United States Patent Application Publication US 2022/0211063 A1 - sequence listing, part 25

SEQ ID NO: 57 - DNA, 4395334 bp, Penicillium roqueforti (residues 2,930,225-4,395,334 of 4,395,334)
  misc_feature (85030)..(85334): n is a, c, g, or t
  misc_feature (96910)..(97033): n is a, c, g, or t
  misc_feature (167455)..(168879): n is a, c, g, or t
  misc_feature (174643)..(174783): n is a, c, g, or t
  misc_feature (186873)..(192763): n is a, c, g, or t
  misc_feature (360706)..(360897): n is a, c, g, or t
  misc_feature (391845)..(392004): n is a, c, g, or t
  misc_feature (496629)..(496817): n is a, c, g, or t
  misc_feature (596161)..(596390): n is a, c, g, or t
  misc_feature (682712)..(683342): n is a, c, g, or t
  misc_feature (719014)..(719102): n is a, c, g, or t
  misc_feature (843400)..(843569): n is a, c, g, or t
  misc_feature (1092679)..(1092850): n is a, c, g, or t
  misc_feature (1157512)..(1162611): n is a, c, g, or t
  misc_feature (1192529)..(1192706): n is a, c, g, or t
  misc_feature (1228209)..(1228320): n is a, c, g, or t
  misc_feature (1338737)..(1338892): n is a, c, g, or t
  misc_feature (1570123)..(1570324): n is a, c, g, or t
  misc_feature (1572372)..(1573009): n is a, c, g, or t
  misc_feature (1778877)..(1779024): n is a, c, g, or t
  misc_feature (2068364)..(2068441): n is a, c, g, or t
  misc_feature (2226839)..(2227058): n is a, c, g, or t
  misc_feature (2309540)..(2309695): n is a, c, g, or t
  misc_feature (2399113)..(2399292): n is a, c, g, or t
  misc_feature (2467946)..(2468162): n is a, c, g, or t
  misc_feature (2498485)..(2498544): n is a, c, g, or t
  misc_feature (2576370)..(2576625): n is a, c, g, or t
  misc_feature (2701158)..(2701378): n is a, c, g, or t
  misc_feature (2766258)..(2766373): n is a, c, g, or t
  misc_feature (2901097)..(2901361): n is a, c, g, or t
  misc_feature (2994151)..(2994296): n is a, c, g, or t
  misc_feature (3046010)..(3046130): n is a, c, g, or t
  misc_feature (3064156)..(3064486): n is a, c, g, or t
  misc_feature (3130941)..(3131099): n is a, c, g, or t
  misc_feature (3154875)..(3155622): n is a, c, g, or t
  misc_feature (3156577)..(3156888): n is a, c, g, or t
  misc_feature (3186839)..(3187499): n is a, c, g, or t
  misc_feature (3198386)..(3198657): n is a, c, g, or t
  misc_feature (3203091)..(3205065): n is a, c, g, or t
  misc_feature (3205792)..(3206104): n is a, c, g, or t
  misc_feature (3207550)..(3207708): n is a, c, g, or t
  misc_feature (3257243)..(3260840): n is a, c, g, or t
  misc_feature (3261646)..(3386645): n is a, c, g, or t
  misc_feature (3388107)..(3394537): n is a, c, g, or t
  misc_feature (3513814)..(3514144): n is a, c, g, or t
  misc_feature (3520662)..(3521054): n is a, c, g, or t
  misc_feature (3528475)..(3531029): n is a, c, g, or t
  misc_feature (3533420)..(3533531): n is a, c, g, or t
  misc_feature (3543907)..(3544094): n is a, c, g, or t
  misc_feature (3640708)..(3640899): n is a, c, g, or t
  misc_feature (3767906)..(3769628): n is a, c, g, or t
  misc_feature (3862252)..(3862586): n is a, c, g, or t
  misc_feature (3867623)..(3868260): n is a, c, g, or t
  misc_feature (3873822)..(3874513): n is a, c, g, or t
  misc_feature (3907202)..(3907429): n is a, c, g, or t
  misc_feature (4023279)..(4023435): n is a, c, g, or t
  misc_feature (4214328)..(4214473): n is a, c, g, or t
  misc_feature (4215560)..(4216072): n is a, c, g, or t
  misc_feature (4384376)..(4386795): n is a, c, g, or t
  misc_feature (4389220)..(4392733): n is a, c, g, or t
  misc_feature (4395332)..(4395332): n is a, c, g, or t
tcgtagtcaagcatcagcttataatgagggtcaattaaagggtcccgacgaatttgttccttctcctcctcggttcggacaccagtgtgctgccaaaacttataaaaggaaggatccaaaatcttcttcaagttgctccatgtcatccaagcccatccaaggctgacttcagcgtagttccagagcaacatgtgaacaatagtggccgtgagcccagcgttggatgtgatgagatagttcacgtacgtggcggtaaggtaaggtgctccagcctgatccaccagggtgctgttcacggtgaagtctgcgttcatgattgcagtctcgttgtatgggacagcagtggtcgtgtttgagctctgatcgtagagaagctgagacatgaaagggaaatccttggctctccagatgtttccgtagtaaagtgccatggagaggatgatacccccgatataaccgatgaaactgttggccaaagtttgaagcggcatccaaagtggggatccgaaaccggcgatataattccagtcaaagcagacggacaggaatcccatgccctcattaccctgggagcctccgaacagatttgtgaagatcagattgtgttggtcggccaagcagaaaatggaaaccgcggacaaaagtgggaagatgtactagatattgtcagagcctgtaaggtagatcgatgtggttgagcaaacgtacctcggggaaccattcccagcaaaagatagccgcgaatacgatccagaataccttgaatctctgcttggtctccgctttgggcttgtgcaaggtctccatgacagtcgtgatgggtaggttgatgggatacagcattgaggtggggtgtaccaaaacattgcgcatcatgcctgcaacgccatacccaatgagctgcgaagaaagcgtaatgaagattcccgcagctacattaggatatcctccataatagagcttttgcacagccaaagcttccgtagacaaggccgagacagctgccgccgaggacatgaggactgctgcggtgtgttccttccggttccacgggaaagggttgagaaaacggccgatgacaccccgtcgtgggataaaggtagacatagccgtacccagagtttgagcaaggacagtcaagaacatgaccgagacgtaaacaacctggggcttgaagtacatgatctcttgcaggaccgctccgaacgcggacaatccgagacctgattcgagtcagcgacatgctagattaccacagaggacacaatgaaaaggctcaccaatgaagaacatgcggaacgtccatggattgagtgttgggtcatcgtcaacatgaatgacctgagtgacgatctcctccgcagtttgaaggggagctgcagtccccttcgagagagcttcggcgtcgtcataaatcggaagaggcacttcgtgaatagaagggacctggtccttttccccgcccttttccccaaacttttcgctgttcacctccgcagagggtacgcgctcaaccagggtgtctgttttggttggcgtcgtcgccatgtcgaataacaagtgatgtgatgtctcaggaggcaggactcagaagtgagagatgttcaaaaggtcaagaaattgccaggtcgggtctgctgatatatcatcgataagaggagcgcaagaagtggcattcccctcccctcccctccccctggactactagcgctcgagcccaaggttcaagaaacccagctcatagcacgataaggactaatcccagcctgtgatcgaacgtaacaaccacttgtcctaaaacagaaggtggccacaggccttagattggcgcgcccacctggattcggtattaccgacggggcgccgtcgagcaggattccaatgcacgaaccagatacaccgctgcgacgataaagatgcaggtctcacctcgtagtggcgtgccatccatcccttgtattggataaggaataagtcactaaaacgcttatacgtaatgtggatgccacgctaagctatctccaatcccacccccggaagcattgtacaatccgagacgcttctccgacggagtccgcgcgctgtcccgaactcgaccaaaggggctatctgagtttcgtcgccataacccgctcaggaacaggcgagtgttgtaatatgttgtagagaaataaactagggaagggccattgtttcaattgacaaagagtcaaaaacattggtgttattactggtataccgaagttataccagtctggacggtcaggctaagctttttcccgtataaatgctatttcgcttaagctaatccaagccttcgcaagcttttccccaagctttctcgctcaaagtggaacttcaagtccgtggaggggccatgttacatttggtggcggagatatcttaattatgaggtctaatcctgtcgccattcacccgatgtatcatttcatttcatatcactccaatcagaccggacaaatcaatcaagatgttgttagccgtcgggtgacttactcttttaagactgaacttgaagacgggaatcttcgaattcggtcttacctcaggctcttacgagttgattcccaagtgataaatgtgcaatcaagtcgcaccaggtgctgactaacatgacacgtgattgactggccctccctcacctcttgagaaaacaatgcgctccttgtccgacagcaattgtcctggtgaggacgacctaaccgcagcgatggatttgactcaacaatttcagcctcaacacacgcataaatgagaatcattgttgcgacttgaaaattacgagagatggaatctgctttgactgaccagctcactgagtcctgcgcccggactactcagtgagccttcctctgaacgcccccattaaagccaagacacaatccgggggaggaaaactataactatcgagcgcggaatactgcgagcgagatttatcatcaagttgaaccatttcaggtattctgagatggatgattaatctcaccatgcacgatttgaaatcaatctgacacccatacctaccattaggtatcgtaagattccgcgatcacccaacatctataaatattgcgaatatcaaacgccataacgcctccacctgggagcttcttgacatccaacatttacattctgttcatagctctaaatatcatattcaacccaataattactccattcatatctaaacatcaacatggcaaacatcaaggttgctcttgccggagtatgtcagcaaacgaccctcatactatcccattctctaacatgatccaggccagcggaaacctcggtcccgccgtactcaaggaactgctcgccgcaggctttgacgtgacagtcctcacccgacaaggcagcgataaaaccttcgattcccgcgcgcacgtcgcacaagtggactacgagtccctcgactccctcaaggccgctctgtctggacaagaagccgtagtcagcactctacatgtcggcgcagttccgatatccactcatctgcgcttgattgatgtagcagtagcagctggtgtcaagcggttcatcccgtcggaatacggctgcgacaccacgaaccccctcacgtccaaattgcctgtctacggcgataaggtcgtcatccaggaacatctcaagaatgtcgctaaggaatctggcctcagctactcgttcctcattactggtcttttccttgactggggtcttgagaagggtcttatagtcaattttgctggcccggcgacgctgtatgatggcggtgatcgccgttttagtgcgacgactctcgctggtattggcaagggagttgttgggatcatcaacaaccttgacgctactaagaactccacggtctatatcaatgaggctagggtcacgcagaatgagctcctggaattgtctggaaagagccttgagacgaaggttgttcagactgcagatctggaacagcaggcttttgcggaactggctaaaccggcccccaaccggacaatctttgctacgaatttgattctgcgggctgtctttggtgaaggatacggcggtcttttcgaccctgagaaggtctcgaatgagttgtttggtctgaagattttgtccaaggaggaactccgcggcctgatccccaagtaatcgttcttttcgataatagtctcagatgttccgttgtatacgtcgagtgcgtatatcaatccaattaatcaatcaatcttattcctcttccgtaccttatttagacagggtaccaatcacctaaatatgtgcaccgcgtaataatatattcaaactcgagtcaaagaaataaacacgaagccaatatagacaaagtaaacaaagccaataattcacagtaaagtatcaagcccacttattgagccgaacactgtccaccgaccacacagagaacaggcagatcagcaacactattcccaacccagagcttaatgccgcgtccattgacaggagccttccaatcctgcaccacaacatcccaaacactaacgtccttccgggtaatatccagcgtaaccgtctcactctgaccaggcgcaagctcccttgtcttttcaaactgccggagctgcaaggccggcgtctccagtcccagactagacggaagctcaacatacagctgggcgaccgccttaccggttcgcttacccgtattctggacctccaactggaccgtaaatacagtctcgaagagagcgggattccccccctcgccacccccggcccgggggactgcatgcggctcggtgctgtagccgtccgggtaggggtatgtattcgtggcagtgatcgactgcgggttggaaaggtaggggtaaaggtagcgccagatgcgggtgaagctggtagacgaccaggcgacttctgacgcgtccggaatgctggtgttgtaggacagggttggcggctttgtgggtcgtggagctgggtaagctgagtctagcggggtttttgttgacagcgaaggctgggaaaagttgaaggtggtgtaagagagaccgtggccgaatgcgtaccgaggtgtgatattggctttaatgaagtggcggtagtcgatgtatagcccctcggtataggtatcttggatctggccgaatggttgactgatcaatcccacgctatccgggtaattatcttcgctgcgaggaatggtgtatggcatgtggccgcttggactatagtcgccaaataggatatcggtaagggagttgccagcttcttgtccagggagatgtgccacgatcactgctttcacggacttgagttcaatccactcttccatcaggatgggaccgacggtgtgaacaatcacgactacattggaaaacttctctgctgctgctttgacgagatcgtcgccatcgtgccaagctttgagtccagcttcggttcgatctcccgggttcccttcgactgtgatatagttttcgcctgaatcggcactgatgaagacgagagcgatatcgttggcattggcggtaacgtctgaggggaagttgtcggtgatgtggaactcggcattcttggtgatattagagattgcctcttgcggtgtgatcagatagggtagcctggctgtgccactgccccagcccatggtcagcacgcctttgttgcacccttggtcggcgcatgagttgagaccgtctggatttccacctgcgtctgtgccgaataccttgagagaatcattgctacgcagaggaaggatgtccatatcgttcttcagcaaggtaattgcttcccgtgcgacggctctcacggtgatgttgtgatttcctctcacatcgacaaactggttaacgacaccagatggagaaaataaagcaccggggtaaagcaagccctccttatcctgggtgttggtcgagaagtttggcaagggatagtccttatcctgtccgtgtttgtaccaagtagcaacgatacgttgaacctagacccgtatattagacatgaaagatttcacatagaggaccacgtaccatatcgttgagacggtcgacaggaacactgccattcaaaactgaacgcgacagctcaggaccccagtatgaatctccgaacaaaggaactgctccatcgccaggcatggacatatccaaaccagctatggccgacgcaacgccagagtaatgacccagccagtccgtcatcacaaatccttggaagccaagctcatccttgagaatcccattgaccaacttgctgttctgagagcacgaagagctattgacctatcagatgtcagcaacacacacaaaataaggactgaagcgactcacatcggaataagctgtcatcaaggacccaacacccgcacgaacaccctcggcaaaaggccagaggtacagttcatgcaatgtgcgatcatcaatattagacgaatagccctgggtaataacacttcccatgcgatgcatttcctgctcattaccaatgtaatgcttgatagccgcgatagcaccggtactctgcataccctttatagtctgggcacctccaaaagcctgcagaacaggatcagcaccgaagccttcccagttccgtccaccgcgtggcttgcgtcccagtgctcccacggatggtccgaggagcacattgactcccttaccgcgagcctcctcgccgagcccaacacctctctcatacatgagctctttgttaaaggtcgcgccaaccgtgataccaggcgggaaggcagtattgtggtccgagttgcggactcccagagggctgtcttggaggcacaagttgggcacacccaggcgaggcacgctgcctgtctgccctacgcagggccccatgaagaagccagtgcctgtagtcagattgactttctcggccagcgtcatattactgacgagaatatgcgccttggagtaggcttcactccagtcggagatccagcctcctggaggtgtgggatagtatgcaggtgattcatagccttctgctgctctctcgtgtaggtgggtagtagattcgaattcttctggtactggggaagctaggagaagcggggtcaaaagagagactagagttagatgcacccaaggagccatggcgatggattcgctatgaacaaaaagaatgtaagaaaagatcgtatattggccagtcaagagaacgagtgcatttttttccaggttcgaatccggggattccaaacagacaggatcgccaggggctataagagaactacagacggaggaactacgtgggaaggagcaacgcccgcgtgcatgtctcggggaaatgtatgttcacgcgtggacgcgtggatgatctttgctggattcgaggaggatcgtcatgggaacccgttgatattgcacttggcagtgcactgaatactaagaacttgtcacgatttttcaaggatcgactcgtgactagtctactagtgaattcactcccatgggcgagggctgcctgacaagaaacccgaatgctgataggctgcatagtgtcaggggttcagcaattaaatatgcaaaccagcacccccttttcttcaacaattcactgtccaagttcattcagtcaatagttcatcgagatattccaatgttactgtagatagaacacgcggcactggcccgcttgatcgccattgaaatgataattgctcaatttcattcgttgttatacatgtccacgtctttagatcttggtgtagcgcaagtaaggcttgacctcgcgaacttcaccaaacttcttcttggcatccgcggtactcacagaaggaggcacgatgacatcatcaccaacgttccagtcgatcggggtagttacacccttcttatcaccggtctgcagggagtcgatgactcgcaagacctcagcggagtttcggccggtggaggcggggtacatcatggtcaggcggatcttcttgctcgggtcgataatgaacacggagcgaatagtaaacgcgacttctttttgcccgatgctatcctcgtcgatcatgtcgtacaagaaggcaactttgcgctcggcatcggcgatgattgggaacttgacttgagtcgagccgacttcgttaatgtccttgacccactggtcgtgggaaccgagctcgttggcactctggagagagtgggcgcatcagctaaggctctgtggaagttataaatggcactcaccaatccaatcatcttgacaccacgtgcgtcgaactcatgctgaagccgggcgaaggcgcctaattcggtggtacacacctaatttcgtgttagttcagtgtcttcgtggagcatgttggtgagaaatacgggcgtgaagtctgcagggtgtgaaaagaggatggtccacttatcaccgatgaactcatggaagtcaatctcgccctgagtagtcaatgccttgaagtttggggctgtcttgtgttagcatggtatattggcaatgcaatcctgttgaaactgtaccaattgagcccaagcgcagatgcggctgttccaccttagccgagtagaggcggctgaaagcgggcgcacgaggcacctgcgcagaccacgaagcccgtggagcagcgccgagggcacggaacatctgagagccaattcttgaagccatgattgttaagagtgaaaggtgcaatcttccaaaatccagagttgacgttgactactcggggacttcagaaacccctgggccccgggaacccggtcgacgtcatcaaatctgactaagcggccacttccgcggtgctgcaacgacgtatcacttccaaggttggtttgtcttcacgccagatatatatctcatctttctagtactgaatctgaatattccttgtattccttcaaatatctcgtatattgtaccatctaaagtacggaaattgcacaatcaagatttatacaaatcctacaagatccatttatagaacgccctatccatatatccgagacatgaagtactatatatactatcagacattccgatgtacggcgtgggaaatttgacgccatccacgggttaaactggagtcaatgattggaccaattagagccccaaatccgagacccttaatcgacacttggtcgatgtccacaatgaagtcagccaatgccgcccgtttaatagcttgaatgattcctacgagatgaaaataatgtatatttgactaaaaaaggagagtcgctatacaaagtatcatatggaacccttgctatcccttacgtatgtatatacactgatttacctgatatataatgcataaggaagcttcacaagtcgagaccaagcttttgtgggccctcgaaggatctttctaacaaagagacggcgtttccctgaaagttggcagatccctttttgaaagtcttatctttgttcttttctcccgaaaggtttcgccaccatcgatatgggacggcttcactacctactcggtttgctgctattgttcatttgttcatttttctggatcgcatcgaatctgggaaaacaaccattaagcattgctcttactcatgcacctcgtgaatcttgcgtctgtagcgaagacaatgttactgtcgcctcagatgtcggtatcataccgtcaaatccaccggaacctcctattaataaagatatgaggccaatatcagaaccacaaataccaagctacctgccaatcgcgaatccccatggtcactacgcacagtcctcaatcccattaaagctctggcaaaaggccggttcaacgaaaatccacgacgaccgccagagagatatcaacagttggctagatgtgaacccacgtctacgacatgagattctcacagacgacagtgcagacgagtacgttcgtgagcattttgccaactacccagaggtccttgatctctatctctcacttccggtcccaatcctaaaagccgatctccttcgtcaattgatcttgtacgccgacggaggaatttggagcgatcttgacgtgacatgtcacataccaatttatacttggatcccggaacaatttcaaaacaaaacaaacgtcgtcgtcggtttggaattcgacgggttccagttcgcgagttggacgatcatgacaaaacctaagacaagccatatcgtggcggtcatgaaatatatcatcgatagactgaaggcatctgctgcgcagtacaatgtgaccactgcacaacttaacatgacgatgatcagcgatgtggtggaagttacgggtccccaggccatgactattgctctattgcagaatctggagaaggaaatgggcgttcctttcggccgggcaaatataaccaacatcaaagaacccaccctatttcaggacgtactcgtgttgcctaatgcggccttttcctctagacaggctggcttcccggcggacagagggccttatctcgttgaacaccattacgctggctcttggaagaatgtcaatggtggcgagacgaaatcttgacatattgggaattttgtattggcgttgcaccgcacgaaatatatgtggcaggacggacatagaatcatgataaacataatctaattttgcattcagcgcttgatcaaatttcgaggaaatgactgttgatagaagaataagtttatgtagtttgcttctatcgtgccgtgtaattttatgctgaatctgctgtctgctgcttgataaatcgaccggccaccatataaaccgccgagggaagaacacagcccggtaaacaagatcgagcatcaattggtttctattttactcactcttccctcacttgatccttactattttctcagttattcctcactctcctctcaccttcctttcgggttgaatataacagccaagcgctagccgaccttcccacggatatcccgcctttccaccagtctacaacccaccccaatcaatctatacgtcatctacagtgccgacccctatgatagcactgattgtggatctactgcctagggcgtatcaaaaccgatatgggcgttgctggcgggggagcaccaaaatctctcgaagtcgtgaccatctcatttacccctgactgattggacgtgatcgtcatcctaaaatcactccctccaagctcaagtacatggtgcacgtcccgttctgtcttggtacgatgaaacaatcttcctcacattctccgtggcagccagactcacctggtataccaaagcatagccgtcacttgattctcaaacggagcgacacagagtccttcctagcacagatgcctacacggtgattacgggcccgtaataatggtgagtataattggtaccaagtcactgcggtcgcaagggagtttgacgaaagtcagcgctgatccgtgctcgttggtccttggccaagaaatatggggttcggaagggaaatcgtggtcgactggacaagcaagccactgtcattgcgcaggtggcgactgacaatagggcgtgagagtcgaagctggtcaagctcgagacagagaccgagactatgtggcccacacagctgactagcttcagtctcttcacgacgctgccaccgcgctcagcaacgaaaacgcggacctccgccagcagatccaggtgacccaaccgtgtgagggtgtggttcggagacgaacaaggcattcagggccgttttcaacagtcagtgagacagactattggagcggtcctggaggcccagtctatcggcgtaagtcttggtgatttcaaagcttctggtcttgcttacaataaagtcccgggctgcgtctgcatcacaactaacccgattagtctccctagactcaaagctataggatagttgaaagttcaatccagaggagcaagcacccactccaagccatccagaaatacccatagaacagggagacacagctgaagcggtaatgcaattggttgaggatcccttgaccactcaatatgtctttggtacagacatagcgtcaagtgattcggacaatgaaggagtaccaagttcctttcttgatgaccaggaggtaggtctctattatcgagtttaaaatgagcatgtctaacgaaagaatatatcggagatagatcagacgttatgggatatcgttgaaaaccttctagagagcctaccctagaatcactgagaatcctacacgaggaagcactccttacgagagaggcacaactccgggtgacttgccatgcaactcaccgagacgccatgatacacactgaagcacgctagtcgtggcatacgttctaagccatatctataagtttggtgttgcttgttctataattgagatgctaactggatggcccacatagtattcgctcaatcaacttaccagcctctacattggaaacgttatgcgtgaatgtcaccgagaacccacaaggtctcagtggaggagctagtcaggggagtgccattttcagagccctctctcgttgtcgaggtttcttgaacagcctttgaagagaacacaagagccattggactttctacctcgatacttttctatcaactgcttatttcagtatcaactttgctaccctatctatcaactgcctatcagaaaaaatacccaaggccgtagatggttctatcaaagagagagttttctcgctcaacaaggatttacttcgtagctccggatcctatgctgtcacacgctacggctacagtttgctcagttcaggcacctgctgctcctttaagggagaccgagcaaaaacacttacggcattcaaatagagctgtttgttcgaaatattcatagttcaggtgaatatctacatgtaactaaggaccgggcttgggagagacggttgatgagcaggtcttgagaagaatcaacttaaatgaagtaaacacttgctagtcaagatatccctggttcagttgctaggaacgaccgtatcccaaggttggcaagctttgtgctttctagtgtcaagacaatggaatggttccattggttcatgtatgtgatctacacgggccgcaaagcttaacctattgagcttaaaggcccacaatagaaaataggccacaatagacaataggccacaatgggttggtattgtgttgggagcctattgatggctattgatggctattgtggcaattcattgtttggagggggttgcctgggcagggtccgtttgaatgggcagtcgttcaattgaggaaggaacgcgtaggaagaacaccgcgtaggcctgcctataaaacccaaccctcgtttttgttttctctttctcctctctctctcttccccctcacacatttatcgcaagaaccccattattaccaacaacaatggctgtttctcgcgtcgtgtttttcgtgcttcttgcggccatggccgcatactggcacactgatcttttccaactcgttggaaccatcgtcgtctttctcgttgccttggtggcagcgggatgctgcatgagcaggtaagtttggaagccttcatccttcatctgtcccctccgtatggccagcctctgggtcatgtctcatggcatcaaaagagttgccatcactgccttgcccaagactcatcccacgcccatcccaactccatcactgccttaccgaagcccatcactgccttgcccaagtcacatcccaagcccatcccaagcccatcccaagtcacatcccaagtcacatcccaagtcacatcccaagtcacatcccaagtcacatcccaagtcacatcccaagtcacatcccaagtcacatcccaagtcacatcccaagtcacatcccaagtcacatcccaagtcacatcccaagtcacatcccaagtcacatcccaagtcacatcccaagtcacatcccaagtcacatcccaagtcacatcccaagtcacatcccaagtcacatcccaagtcacatcccaagtcacatcccaagtcacatcccaagtcacatcccaagtcacatcccaagtcacatcccaagtcacatcccaagtcaaatcccaagtcacatcccaaacactcactcaaacactcgcccaaaagaccattaagactaacgttgagtagctcccgtgggtggttgttccgactgctgcaagctgcagcagtgtcggtcgttgaaccaacaccgaccaacgacacccccgccaccaaggccatctcggccaccgaggccgagatgaagagaatttcgacactgagagcgcaggtggggattttggagcagcagctccgtggcacggaggcacgagtgcgtgactccgagaaagcccgggagatggagaaaaaccgccatgacaaggaggtccggaacaaggacgctcaactggcaaccatctctcgggggatcaaggagtcccggtacgtgaaggaccaggtcatcgtcgagtgccgccagtggcggcgcaagttcgaggacctggaagacctacagcgactggcccagctaaatcccgttcgcgggatgcagggacgtactcgttgggcccctgccaacaaaaacggagtgcgaaaggggaatcgtgctcgaccggacaaggagttcactgccgttgcgcaggtggcaattgtcaatgcggcgtgggagtcgaagatggtcagcttcgagaacgaggcccgtgcttatgtggcccgcacggctgaccagattcggtctctcaacgacgctgccaccgcgctcagcaacgagaacgcgttcctccgccagcagatccaggcgacttccggcatctcccacgagctggcccagcagcaaatgggggaggctgtgagaagcgccttggtgaacgccgagcagcaacatgaggagcgtgtcaagttgctgaagcagacccatcttggggagctgacggcagtcaaggtcgactacgagggaaaattgactaaggcgaccgcggaatcgaaggcggaggcggagaccgcactttcccagcagcgtgaggtaggcgagggagcggcacagcacgcactcgccaccaaagaagcgcagctgggggagctgcgtgccacactctcccagcagctcgaggcgagcgaggcagcggctcaggagacaagttccctgaagcaggcactcgccgccaaagacgcacagctgggggagctgcgggctgcactgtcccaacagcatgaggcgggcgagggagcggcacagcacgcactcgccgccaaggaagcgcagttgggggagatgtggaccgcgctgtcccagcagcgtgaggtgagcgaaggagctgttcaggagacaaattccctgaagcatgcactcgccacccaggaagcgcagctgggggagttgttggccgccaatgccatgatttccgctgagctacaggctagtaaggaagagcaggagaaactggatggtgacatggaggtcgaaacctccagggtcgtccagtacgtgcaagagagggacggcgctattagagccggcaagaaattgcaggagcaattccatgccctgcaggagcagtacgaggaactacggtcctcgtacagcgaccttgcggtggagaaggcgggccttgaggtagaaattggggacctaaaggaagcagtgtccgacctcgccgaccaaggcgaggcgatgtaccaggaggtcgaaggcctcgagggcaacaaccgagccctggcaaatcaaaactccgagctcttttgccagtctttggcatcagacatggagctccagcagactcgggacaaagtgggcaaccttgagcgccaggtgacggattaccagacggcggaggcggcggacatcacgtcggcggttagcggcatggggttcaacgctgaataagcgcccatccgcccgtcttagcctcccccggtctccgtcatcctgctgcagctcggttgctcactttgttgttgtcctcacactgcttcctataggttctcaacccgcccccacctccctctctatcttccttgctgttgtctttgtcttccccccccctattcctcgctgttccatccctcatctgatcaccccctctcacccccctctccggcgcgaccgaccccccgcgaccgaccctatatatatacatcgcagcatgtctcgctaatgactctcggtctcatgaattcaccataccgctcgtttgccgctcggccagtgatgctgagtctggccaagcttgtgctcgttgcgatatggcaaattcctttcaccacggcggcgcctgtcttctcgcggcttgttctgtcatctcccgacacagaacaggggaaggaaccgagcgatccaagtttatggctttatttgggattttcggctgctcttgtgttgagcggtggagcattcgcgggtcttacgattgccctgatgggacaggttagctctttccaatgcggctaaaaaaaaatccccgatgagccaggctaacgtcttgattgtttcgtacaggatgaagtttacctccaagtcatccagacatctggcgaagggcacgagaggaaaaatgctactagtgttctcaatctcttgaaccacggaaaacattgggttcttgtgacactactcctcagcaatgtgatcacaaatgaaactttacccattgtccttgaccgcacgcttggtggtggttggccggcagtgttaggaagcactgctttgattgtcatcttcggcgagattgttccacagtctatctgcgttcgttatggtcttcccatcggtgcctggatggcgccttgcgtcctggtcttgatgtacatcatgtctccagtcgcctggccaatcgcaaagctgctagacaggctgcttggagaggaccatggtaccatctacaaaaaggccggattgaaaacactcgtcacactccacaaaacattgggcgaagccggagagcaactaaactccgatgaagtgaccattatcagtgcggtcctcgacctcaaagagaagtcagtcggcagcatcatgacaccgatggatgatgtcttcaccatgtctgcagacactgtgttggacgaacgcacaatggacctcattctttctcagggatattctcgcattccaatccacgctcctgagaatccgatgaactttgtcggtatgctccttgtcaagatgctcattacctacgacccggaagattgcaaacgggtccgtgagtttgctctggctacacttcctgaaacacgccctgaaaccagttgtctcgatattgtgaatttcttccaagagggcaagtcacatatggttcttgtatctgaatatcctagcgaggatcgtggcgctcttggagttgtcaccctggaagatgtcattgaagaactgattggagaagaaatcattgacgaatctgacgtctttattgatgtccacaaagccatccgacgaatgacgcctgcacccaagtctcgtgtcgccaaaggcaagatcgtcgaggaacctcctttgaacccctctatcattcccgatggcgacttgatcgacgtgaattccacacaaccctcatctttccctaggccttccgatttgattcgccgccgcagttccgtggaagcacccctccctcgctttcaacttcgaaagactactgccgacatgaattctgactcggcaaatgagtgggttacacaagtcggcgccacagatgagattcgagaacacctaaaacatcttggtccttccaatctggccagtaggccgcgccaaacccgttaccattccgtcaagatcaagcgcaacggcacctctccgtcccgttctgcacaaaccgactttgagtccggacaaagcacctccgactcccaaaagcttcttccttcttctaccgcataccaaggtggcataggtgcgggcttgctcaactccgctggaacagacgcgaaagacggtgcgcatgctctcaaactgggctacggcaccatgctttcgcacgacagtgtaagcaaaagcaccggtgctcatcaatacaaggaccttccccaagtctccattcccgaggccgttcgtgaggaacatgaagacctaccgcgttctgggccggcgcgggaggctagtagtgatgctctacgtgacgattccgaaaaccaaccgcgttctgggccggcgcgggaggctagtagtgatgaaggcagtgttgaatcgtctggtacaccaggcttcgtttaccaccaccgcggaccggcgcgcagtggaagcatcacagaacagatcgtggatgtcaatggtatccggaaagttgttctgcatgcaaattgcaccagttcttccgagggggaatcccatgcaccaggccatgatcacaaccacgaccagcatcataccgatggtgcggtccttgagaccgatgttacaaaatccgaaacccccgacgccggccacgcaaaacccaaaaagaagcgtcgccgaaagaagcatggcaaggcttcaaagtctgatggcggtccctcagagaaccagccgttgctttgatgagccgttagttagtttaatgagacctgtcaaaccatgtattttcacttctttttgtaccacagttatgcctgtagtcatgagatgtaaaagcgcctccgggaaagtctaagtatatttgcattgctttggaacggtatatgccaactaagaagcccaaagcctcttaactcgcgtaggaacttgatataccacatgaacactgggagtagatttcagtcaccttggacagcaattgttgatttaaatgcaacattcgtggagagaacccagaacaggccagcacgcatttacatgtagactcttaaggaacgaaaatcaccacctttgagaaagttgtcttacccataggtaaactatcatgttaccacccactgcctctttctagatagtgagtgggtgtgacatatagagctggattgcccaaacattcagggactaagactcgggattcaataggagcctatgagtgtcttactagcaatccttttcaaacaacccttaatgtaattataaaagccatctagggggaatttaacattagaaccagacacaagtaggcaacctatacaggctacaaatagttatagtacacggatagatgtacaaagagagtaaatgaagttgtattggccggcggcctgaacctgctctaggatgtaacaccgaaagtcgacagtatgagcctcggaatgaaagccatctaggactcactcaaaagggcgtcgtttaatattctgaagtccttggagatatccctcgatcgagtcggacttctccttctcaacccaacccttagtataaactcccctaaaatcaatcaggtatacatcctcattgatatcaataagtatattggccgcctttacatctccctaaatgatattatataaatgaaagtgttgaagtgtgtgtgaaacctgatcaaaccatttttgtcaaagctcggaatatttgggattatatccatcaatacagttgagtgtagctctactacaattgatatataagaagactaatcctatgatatacccattatcatcctagaccagccctcctagttgcgatatgagaattgggggatcgaatttagctatataaatctttgaataagtgagaatctcttataagaatacccgcattaccccaatagactagcttaaagaagctaggccgtggtcgcctatgaataaataatttgcgaggtattgctggcagtgcagctgagtctgcactaattggaacttggacttccctaggatggtagacagaaaagctcgagtagtcgacggaggatggttgcatcctcttggtattactgagataaacaggaactaacttctcttctaccacctgcacagtgtagtggaattcttctgcaaacagatagtcgttaagcgtatacttttgactcgggtccaggggagcaaattcgtggaagattggcagaaatggccgtaaggcccaatcatgcatttcttcaagagggtcttcaatttccctatcattatctatctcagcctcatcgggtatccattctggctcttgacgtcgaacgtgtcgaagatgttcggccaggagggtagatgagctttcgaagctggaagcaaagagatcaatttcgaagcgtttttttggaaacatagacattcaactgtgtgtctttgtttttggtacttgatctaaatagaccgatttcatagatgggttgctttcgtgttatcgctggcagtcgaggagtgcaaaaaataaaggagatagagagtgcagtttatcgatcaaatcggattggaagctaacagagaactagaagagaaaaaggaacaaagagagatgggaacgaagaagcctttaccctaggcattggtagagtcagctatagacggttatatctaactagccgatgatacctcatatctgcagcaggttggcaattgggtctccgcagcagcctttaccattgccaccctaagccaaaaatcgaccgtatggataaaggcgtattggagctagacccaaggtagaattatcacaggttctcctgttacatctacaactataagatcaagacacagaaatggagcaaatttgacttgattttgctcagactaaatacatgaatgatatctcccaaaagactcccccagataacaggatgagacgacgacaaagtgacaacagctgtaacaaaaggtatatgtaatagtccatgtgatgaatcgatcattgcagaagagggtcctagtgggaagttagttttgcaaaacaaaaaaagagtacaggtcgaacataccctgaagtgcttctggtgattgttggctttttgaacgcgggcaacgtagcggttctcttggcgaagggcacgagtcctctcgcggcgctcggcagtaagagcagcttctttttgttcgtcggtaactccaatcatgcccatgccaccgttggcacgagtgataagagagcggtgatggttggtgcggccgcggggaggttcctcctcgatttctccattcgcaatggcaagctggcgggcagctcgttcggcggctgaggggtatttgtgcaggttttgtcggtaatatttggcaagcgaacgatgaccgacactctttccagatggaaggtggagctcgtagtctgcctcgtaggcacctgaggcgtttcgatatgagtcaagatcgtcctcgtcgacggaggatgcagaactgtcggtttcccagccttcatctccatctccgtgcaccttgacgccaccgctcccggcagtggattcgtcttcatcttcggagtaggtgcttcggaaatcgtagtattggccgatttcaacttgttcttcttcggactcgaaggcaatcatgcagtggctcttgtcgcgcatgtgggtttggatggcttgtgcgtcattcttcatagcgtgacagtaaagacattcgaagttttcggtgatttttcggtagagataatgcacgaggccatcgagatccgacaaatatttttgttcggggataaacatgccgtgctctatccgcatgtggtccacgttggtgtgaatatcagatgattcagttttgcagaagagacagcgagtcgccaagaactcgtccttcttgatatcactttccatatcctcatcttcttcttcgtcaatggtggcagccttcaggtcctcggtgaccttgctgacgtcatcgcccgatttggtcacgggctcgccgagagagaaagcggaactttgtacggaggcagcatcgccatccttacgtaggctggccgcacgttgcttgtgcttcgagctgttcaagtgattcttgtacgagttttcgctgtagaatgccttattgcaagtgtggcatgtattttcgtacgaagctttggcagcggcctcattggatgtagctttggcggccagaactttctcgttgaaggtttcgagagtgacaggtggcagagaggcgatgcgacgcttcatgttgtataaactatagaaaatcagcttctgaagtcgcaaaaaaaaaaaaaaatcaagacggaaaagagacttactgccagtctttgcgcatgtgatctctctgaacatcgctgcgttggaaggcaacgagacaggtgttgcaagtgtattgcagcgaggctgcgtcttgggtggtcgacgacatatcggtagattttcgagagtcgtgggtggttgtaagggcgggtttcccctttggattgtgggataaatatttgttgcaggcggggtacatatgaaggctctgcctgggcccgatttgaatgattttttgatgatctgagtgtatattgatgatcaaagtagatgaaagtgatgcgatgcaggtggatgtaagagagaagaattttcggagggcaatggtcctgcgagtgattctttatacactcgatagaccgtcatccagagttgctccgccgcttgaaattgtttcttatcgagcgactagccccctctcgaattccactagtcctatactggttagcgtggttaccgtaaacggcttagtagccttcgaaaaggccggcggaactgagtggaccaaggtccgccggattatttaacttccgacagctccgatgccaaaaggggaaatattttgcctgaggcatcacatcttactacgttatcaggtaagctggagcgtcttcaaggtaggtcgcatttattcaacgcgtggcgacgagtaaaccactagcgctcatcctcgcatccagctgctctcacaccctcagaaatgccacactgctaaaaatgacgaggctccgtggaggttccatagacgacccagacatcgcgcaatcccccgggcacgggcgaacgaacacttatcggtcaaagctcccaccaaacgcatcggatgcgctctcacagaatactattgaggtatccgatccctcaagagtgctaccacggtatcgcgatgatcgaagacgaaagttcaacggcttagtgcgccggtgagtgggactccaaacgctgggcctcgcctcctaattccgtatgacactaattgattttgcggaaaaggtacaaagctcaactgcttcacggctgcgatgaccccggatgtcgaacagctacatgtgctagtcatcgccgaagactcagtgaaggtccatatcgtcggtacacagaacttagtgcgaggacgctggcatgctacctcgccagcttggacgacccggagaccggtctatgtctcaatgtgcctaagcctccacctcaattgacagtagaagattaccatcggatgtccctgcgccgaacccgtacacttgaagcacagacggcagcggctaatagatcgccaaaaccggatcagtatgacgaagaccacccgacccgcgatatgtccaggcctgcgcaagatagatcagcagtgtcaaaagtgacagaagggggttcttcgcctcaagtcaacaccggtagcagctatattcgggaccttgaccataccgcagagcaacaactaaaagaccccaagtcctttacacagaatctctttgatacaatctcgctccgtatggtcgaatggcttcctcttcgccgtgctgcggatgcattagagtcaaagtctaaaccccttgcaccgggaactgcgagctatccatctgctgctgagaagcaccactgcgatgccgataaagttccaggcagagatgtgaagattccagcgagttccacgcctgcaaatcagcccatctctcaacctcgtactccttcatcgcgaacgtcggcatcgcaaccccctgcggtcgagctcaagttccagaaccagcatgtcaagcgactgtcaatctccgaggttgaccattggcgccagagtccacgatcaagccttgaagataaaaagaaaccagaatttagcaggaaggtcccggtggcttcttccgatgagtttgtcagcttgccctcaccgccggcgttaaagcaccgtccgcaaaagcaccgcggaagaattggggacgtcgattcggttcctctgaagggacaccgcaaaagtcaacgacgtgtctcctgggacagccagaagctgctcgatgaggtatctcctatcaacaatacgaggagcaaggagctcatgcctcctcctcgccctttcccttctgttaaccaatcccccagtgagcgcaagacaaagcaacctcctgttgaaaattcgttagacaccattcctctggctcagacgatcactcatcttacccccgagattatcgatggtctgtcacgggtcatgattgaatctgcggaagatgctgattgctgggaggaagagcttgatcgtattcagtgcactggcagctttgagcagccggattggtgttttgcaactctgcgtcagcgtgaagtatttccgttcgttgcccaaagtgtatttttcgtgttcagcagccccaatcaaattctgcgctccttcagtagcgagccaacagatatgattgggactactttcagtcgccttgatgtttcccatctgcgtttatcgctgcagcgcctgttcacaatatgcccatgggatattgcactacatagcctatggagctctctggacaagctctttgttcccccgcggggatttacctcttctggacggccatcccgccgatcgtctcgcagttcgaccatgacaggacctgcggcccctccgatcgttccccgacgagtttctgaatctgccagtgaccatcatatgtctgatcctgatgctgcctacattgccacgattgccttgttcactttggtcagcttcgtgcctaagattgacttggggacttggaaagcggtggttcggatgcgtgccgctgggtctgtagcctcgctctcggacatgcgcaagctgccttcgaagaatgcccagcaagctatcgaggtgacggacagattcgagcacgagttaggtcttcgcctcattaatcgccagtcgtgcagtgagagcccgcacgaggcgattaatgaggcgaagacctaactcgtgcgggctctcactgcacgactggcgtatcatgaaatctccaaggcccgccaagtgtacagcctcgacgtaccaacacaacgaagactcagcgtattggaccgtgtcattgactatcttagtgagcaatacatctctcacactgctggcagcgatgagcccgctgagtctatcaacccatcctctctcattgttgagtggcttcggactcttttcctgcgtgaatgggacggcaaccccgagatggctcgtagcagcccagccggtggtgccgttcagattctagcctcaatgtacaaggaacgaaaccggttaggtcttttacccgaagacttccatacacctcttctcacggagcggctggacccattggatatgcccgtggcatgggttggaagcctcacaaacaaccgaaccatgcatctgctatcatattctttccttttccctccgtcgtctctcgtgatctacttccgtgctttgaactatgctgccatgaccaagtcctatgaggcggctatgaccactacgagacatgtcacgcagactgcctttggcgccattcaaatttccgatgatcctcgactcctcacctccatgaaaacatccatgtctacttacctcgtcattgttgtccgccgtgacaatattctctccgatgctctgagccaattatggcggcgtgaaaagcgagaactgatgcgacctttgaaggtgcaaatgggcatggatgaaggagaagagggtcttgaccatggtggtgtgcaacaagagttcttccgtttgctaatgggtcaagcctttgacccatcttatggcatgttcacggttgatactcgacaccgcatatcttggtttcaaccttgctcattggaacctctctacaagttcgaacttatcggtctgttgatgtctattgcaatttacaacggcctaaccctccccgtgaatcttcccactgctttctaccgcaaaatgttgggtctgaaggtgaagcatctggaccacatccgagatggatggccggagctaagccaagggctcgactcattattggcatggaaagatggcgatgtcggcgatattttcacaagaacttacgagttcagctttgaagccttcggaagtgtcgagacagtcgacatggaaaaagttcatcgtgatgcagcgtggcctgttgctagcaaagtcaaaatcaccgctccggctcctatagcgggctccagcgcctggatggacgtgccagcttactgcgaccctgcgacattgagatcaccaacctccatggcagtcgaggagaccaccgatgccacaccttgtgagcctgccccagacacggccgtcaagtcagtatctgagtccatatcacttcagtcccctctgctccaggatgaagaggccgctcttgtgacgaataaaaatcgaaatcagtttgtcaaggattacatcttctggctcacagacaaatccattcgaccacagtttgaagccttccagaggggcttcaacacatgcctggaccgatcggctctatccatcttctcccccgaagcccttaaaaccgtggttgaaggtattcaatcgattgacgtagacgagctcgagaaacatgcccggtacgagggtggatttggtcctgatcatcgagtcattcgtgacttctgggatattgtccacgaataccccaatgagaagagggcccaattactcgaatttgtcactgctagtgaccgagttcccgtcaacggtatctcaagcattatgtttgtgattcagaaaaacggcgttggagatctggtaagttctgccactttttatagcctacataatatggattgttatactaattgctcttctagcgtcttcctaccagcttgacgtgcttcggacgtttgcttttgccagagtactcttcaaaggagaccttggcaacgaagcttgacaaggctctcgaaaatgctcagggattcggcgttgcataaaaggttgtcagattacattttgcctatacatacccatttgttcgatatttcattgatgtggtgttagcattctatctcatacggtgcaaatagcatagtttcatgaagcacttgtctttacatggacatctcacgaggatttaagatagacaaatcatagtttatagatccccatcgtactccaatgcagggctctggttcgcctgacgatgtggcgctccgcaaatttataccaaatcggacttctgaggtccggcgatgactcttagcattcacatccctaagtgtatctgtttactcttttactcgcacatatctctttacattcggaaattccctttgggccaagtcttctgtataaagtaagacactccgattcgcacgcacaacttacccgctatcaccccccacgtcccgcgataagcgcccatcttcgccttcaatatctgcaactcctgcaagttctaacgtgaaatttaccagcttactccaaatacccgattgaacgtttgatcatggctcccattattcactgcgtccgccacgcccaagtatgtccttatagtgacagtgatcgcaactccctgagcctcgacaactaatgcgcaacatggctcttcactgctcagtcgagctaatagataatcgcagggcctgcacaacgtttgcaccgccaaccacattatccaagaccccgttctcaccgagcttggccacgaacaatgccgaaagctccgcgagagtttcccccgccatgccaatatcgacctggtaaccgcctcgcccctccgtcgcaccatctatactgcgctcgagagctttgcgcccgtctttgaatcaaagccggacttgaagattatcgccctgccagacattcaggagacttcggacgttccgtgtgataccggcagcgacccttctgttctgaaggaggagttcaagacgggggttgatctggatcttgtacaagatgggtggaataacaaggtatgcttctcattttattgcacctcgaaattgccccattattatccaaaacgtggattactcacatttgtcaaaaggcatctggtcgctacgccccaaccaacaaagccctcaaggaacgcgcccgtgcagcccgtcgctggctgaaagcccgcccggagaaggaaattgtcatggttacacacggcggcttcctgcactatttcactgaagactgggaagacagcagccaattccagggtatgtgacgtcaagctacgactgtggagaatcataccgctgacgccgttttccattgttccaggcaccggctggtctaacaccgagtaccgcactttcgctttcagcggggaagcacacacagatgatctggagggatacccgctggacggtgataatgcctcacttgaggagacacttgaatcacggcagcgccggggtaagactggacccatgcctagtcgggaggaacagaagacgctgtataagaagggctaccagggttgggatgaccagggattgcagatgagcactgctgatcgggaggcggctaaggccactggaggtgaggaggtcgatggggtccgcatataactgggcagaagaagtgtgttttgatggacattgctatcgtaattttcggttgtcgcagatggcgacgggtaacaaggatagagcgagtacatacatagatctgacatgaaccaaaatggattccttggattccttggatgtccaagactggctctttattccattgtctgttgctttatttgcgttagtccccttgactattgagccccttgggctattttagccctcggtggctgtttcagcaaacaatagaacaaagctgacaagcatgcattatatgcctccattgttgagttctttactcgatctaagtcttctttatcttcggttgtgaacaatgaccttggcctcggaacacgaaacagtctgccatagcctcgacaaggatgccgacaaaggatctgtagaacaactatgaactaagctacccctttgtcttggatatgattgtctatataatggctttctggcccctcgcttttgatcccgtcatcaggagcaatccagcccaggacagagctcaacacctacctgtcttccactactattgcgaaccatccgctgagtaccctttccattcatttttgggatagacactgacaccattatctaggaatatttacataccgagaataccttcttattatatcacaggtgggaggccccccgcaagatgcattgctaacatagaatataacataacagacaaggacaccgaggcattagacgacgagtaccaatccgaacatgcatattacctgtctacggctaagttctttgataacccttatactccccccttggcttcctctactaacgagatccagagattaccgcaccacgggtcgttccagacataccgtcttaaatatcattacacatgcagtaggtcattcccgatgcgcagagacatactaacagaccggattagatcccatacgaaatatttcccccagagggatccaaatagcgactagctgaacggctaagttctttattgcccttcttagaaacatgaattcagtactaacgaagcataggcccgccgatattctttattcaacatcatcacatagctcccatattaaacagctaagtcattcttcgtcctcgtgttactaacccgatttgtatagatacatctcgacgatatatgcacagtatattgtggctagctattagcctagactggggttgattatttgtgccaaatattgcacattgtcttatttatcaagcagctaggtcattcccttgagcccccatgttgactaatttggagtttacacgcagccatatatcactaggccaccgggactagcttgattaattcaacggatgagctgttcacaacgcacctctttaaggagactacctattgttatacttgccaagcagctaagttatcccttctggaccccattacaactaagtggtatcatatagatatcgatgcgggtactcctctcgaccaatctgcaattggtgacggctcgtgccgtgtacgagattagaaaatcgaggcatttcactcttgccaatacccatattttgctgcttagcagcaagtgaccatgagcagactataccatttattaaattactcttgtttctgtctcgctacataatactgtcacctaggaatgaaggaatggatagaaatgggccttttctgattgacatatcctcgctctgatagtagctgatcagctagtacaccacatcgtaaggtaaggtaagatagatacaattatcagtttgataatccaggaaattgtgttccaggatccatggaactttcaacaaacttgtctactgtgccgctccctcgcccacctcacgctgctgggaaagtgcggtctccgccttcgatcccgcggtcaccttagtcaattttccctcgtagtcgaccttgactgccgtcagctccccaagatgggtctgcttcagcaacttgacacgctcctcatgttgctgctcggcgttcaccaaggcgcttctcacagcctcccccatttgctgctgggccagctcgtgggagatgccggaagtcgcctggatctgctggcggtggcagcgtcgtggagagactgaatccggtcagctgtgcaaaccacatagtttcggccttagtctagaaattgaccagtttcggcccaagcgccgcatcgacaattgccacctgcgtaatggcaatgaactgcttacggtcgaccacgattcttcttccgaactccgtatttcttggccggggcccaacgagcggatcagtgctaactttcgtcaaagtttctcacatcaggtgtgaaatcctgccattttcctcaaggtccaatgaaaaaattggatgtaacgccgacgaggtagtgtggggttgtaatgttgcggtgctccagggttggagaccgatagcgcacaagtagagtgatcgaaagatgaagatcactttgaaaagagaggtaaaaagctcgtgaaacttcaacttatagtttattcaggatcaaaaccgataggtagacagatgattttcactataaactaggttagataagtttgagaaatgactcgaatagcctttaccaaggttcttcagctcccgctgggaatctcagcaggcttgacgtagtggtaagctgttgtaaccagccatttaggacgagctggacaagccttctgcctgtgtacggtagaccatcaaccaagtagctatatatcaggcgaagaaagcctcgcggtgtgagacgccagatcgatcttgaacaagagagagtgtattcaaatgaataatggggatggagagagaaagaagaagcaaattggaaattgagaaggaaccagttgatatagctgaccaaaacattgcaaacctcgaaccttctcgctaagctatctagcaaacaatctatctaatggagtaatgcaaacagtaagcgagtaagcaaacatgaagcatctgatagcgatctatcatagatcgtgacacgcgagactaagctcccatgatgagatcgacgtccttgaatttgttagtacactggctagagaaagtcttacttgggttagccatattcctatttcggtatgtatggttccaaccctaagtttaaactgaggttgttgtggggctagcacgtgatcatggctcatcgcgtcagtcacatgactgttcgtattctgggtgatcccgtggtcatgtgatcatacagggtcaccccataccacgtgaccggctgccccaacaatgcatcgccttctaacgcgctttaaatgctggtgccttcaattgacgtacgaatcggccgggggcttctatttttagctgccgatcacccagtcccgtggcgcagacttcacttccatgggcgaactcttgatataactccgcacaaccacctgggtaatctcttgctgcattgtacaccccaaaggacaaaatgatcgatgaaaatttacccagtacgttgtagggactaatttcagcctcgtctcttggtgcagactacgtcatcccctgctagcttcacgattttcatactgaccgcgggacagcgttcttcctcaagaacaactcaaaacaacctcagatcagcacaatatatcatagtcaacatggcaatgaccccgaacctgcttactccttgcacgcgcttgaccccaccgccccaacatcacagaaccgttatggagttgcgctgtacgacccttacgtgacaggcattgtctatggagaggtagctgtagctccagattggactcaaccgagtctgtcggcagacgcaatacgagcaaatggcggcgtagttccgcccccagaacccattctccctaccgattttaccatccagctttacaaccccgaccaagagatcaaagttcaatatcatacaaaatcgtggaacaaaccagcccggtgggaatttgagatgcctcaaaccacattccgagttccttccgcctcagcgctagaccagactcagatcgatccgtctattgctgacattactccgaaattgaggttcagctggcgcaaggatgggaagctgtcgaaggatttgacatgcctcttacacggcaaaacttcaagaattcccgacactcgctcaaagagccgtgagccagatattacggtcgctctatttcaagggctgaaggagctaactctctacgagcccaacctctaccgcgtcgagatggaagatgccaagggtttggaggtcgtgctcctcttagctgccgttgcaattcgagatattttctttgggcctgccaaggaggctttccatatcacccccggtgggctgaacgaaggtcacaagcaagcagcagtgccaacttcaattacagcgacggccacaccagctagtgatcccagactcgatcggaagaacccacaggcccgaccccctgggccaacaatgaatggaaagccatcgccgcctcgactcagcattcccaactcctcatctccggccccacaagagagaaggcgacaggacgaactcgcaaaacaggaagaggagcgacgaacccaggaggttctcgccgcagaaaaaaaggcacggcgtaagcgggaagcagaagtcgagaaggaaaccagacggctgcagcaattatacggacaagaagaagaacaagcacgaaagcaacgacatactcctgccccatcttccaggccctaccccccaccccgacataccggaccccctcaaccttactcgcaccaatactctcaatcctcagtccaacttaactcccagccagtagcccgtccatcccatcatgccaaccaacgatattcccatggcgcacccaccttcgccaacagcccatacctccaagcaccgggccgcatggatccccgagcccaatcatccacccaccttatgcagcgaccacaacaaccacacccgcaaccccggccacagtcgaccgttgcgtttcaccagcttcctaccagtagcggcgctctcctaacagcatcaaggccgacacctcaagtccagccgaggaagagtttctttgggctccgacgcaacaaggaggaaactactaacaagcttgaaaaaaagcggagttctatgttttaatcttgtataccctggcgttttcgtttttcccgcatcatactttgcatctcggcgtggttgtattttgcccatgagtatctcattgtagttgcacagcgattactttcattacaatgcatggcatcttttgctttacaatccattccagacctagtaaattggcgatagagctgttgtaatctcttggtggttcccgaaggacacggcaggcatggaagtccatagcaaagcagaatgcttggacttatttatgtccgtgtgggatatgaccatgtccaccacctataggattatccgagaggaaggagcactgaatgagtagattatctgatctacgtgcaataatcctacaggcaccaaggaagcgtcggaatcaaatggctattctagtttgagtctagcttgagatccgatacacagactggtaaagtagcttggaattatggcctagcaggaatcggttgttgccctcaaggtcttccaccttttggtgcatcgactctccctcgtcagtgagatcggcaattgcttcctttaggcccctcaatcagtgagttcttagtgtcacaagagctctgtactcgaactgcaatgcgtcgtctcgcttttgcaatctcttgccagcccttagggagccgttcctctcttgcataaacttagtggccccatcggtttcgttcgctattgatctctttgatctctcgttgaaggtcgtgggggtggtgggactatggcaattacagccgtaatgtgggtaaagatcgagaggaggacgaaatcttctcttgcgagcttagctgttgtaccggaaatgtagtcgggatattcttgggaacgggggttttcgggttaatcaatcagagccctgtcgactctgacacgaagtctgaagtgaccagatgaggctttggagtatttcctttgtgcataccaatcgccctgagcgtcgggtttctggttcggaggggtgattggtttcagaaagtcgaagaagcttgagactccgacttctagagctgcaattgtttcttcttgcaacctccattattgcaagacggttctgtgttgtagctctccaccagcctttttccggtccattttctgcactcttttggtttcttctaccatccggccgtcgaagtcatcatctgttttcttgctggcctttttttgatgatcggtgtatgcatatcttcaaggagcttctttcctgagccactcccttagcaatgtgtgtttttgtgctagctgtgtcttcttgtgggtagagttctagcccttgctgcaagctttgaatcagcgaatagttcggacattatcactgttgaggtttgacgacgtaggataaagtgagagaaaggtcaaagcaggtaaggaagatatagaataatacatcttgcatcactcaaagtggccatgatggaagagcggtataggcaggtgcttgacgacgtcaagagagctcactgggggaagaggatatatgtagaaaggaagcatcgggggagtgatgagaagagggaagggggtattcataccttaggatatatatacagagcaagggagtctcggaagagagaaggacttaaagagactgcatatttatttgtccctcaggagatgtgaaggggaagaaccgagagagagaagtgggaatatatccgagaggaagaagatctcggggagaaagaatggacagagggtagagtggaaggaggtgtatatttatagccaaacctgagaagagctcggaagataagggtaggaaattaccaggaaagaagtgagttaaggtgatataagtatatcgagttatatagaaagagaaaggctcagaagtaaccagcgatgactaggaggtgtggagggagggagaatatgtatttatacattagtagaagtgaaagaagagaggtcaaacttcaaaggagagaacaaggaaagagaagtactacatactaaggaagagggatttagactcagtagtagatgaagcattttcttagtcgggaagttcccatcttggtacccaatatctaagtgggtatctcgggtggcactactccgtaggtatgggcttattgatgataacctactccgtactattgcggcgagtaattcggtggatcaatggatcaccagttagggcaactgcgtctgatctgccactgtctcggtgtctatagatatgaaatgacgtcatcttcaagaaagccattgctcggcgatcaataaggtccccggtaagtggagctagtcctaactcggcctcttcgctgatccacccgtggcctatggcgggcttactacggagtgtacggagtatgtacggagtgtgtacctgcagtcccctgtagtctgggccgggcgtctggctgattaccggagtaagaactcggtgtaagaaatcattcgctgtcggtcttgcactcgccgaaattcggagctcgggtctatgcggacaagccacaggtgtggccggcaaccaataggagtgacgtgacggggcgcgggagtgccacgttcgcaagccacgtgctgtcaatcatattctcaaactcaattgagaaagagttgccctttcccagaccaataatcgacaatctcttccccatgactctaacagaatacaggaaagcctcacattcccggacgaaagggatcggcgatgcttgcaagaaattatcgttggccccgacggatgagaactagtgagaactgcgccacatttgctcagccattgccgatgtgagctcatgatgccatactccgtccatggtctgacgatgtggttatgtgaagggctggtagaggcctgctacctctcgtggtagtctgtattctggatacagcagataccttgatcatagcaaaactacccgcaggcgaggcttctccgacggagtagttggccgaccatgagtggcagtgccgttgggagagtttaatcgatctgcagggatattgttcgcaatttataaataggggcggaatgttgggaataccctgcagatctatattttctgggagtgagatgctgcaatatcctgtagttctgagcaattctgaaaagggagaagagatcaatttacagagaccaggaataggatgaattgaaagggtcaattgactatccaattgactaaaaatgtactctgtaggtaaaaaaatgatgtatataacatagatccgatcaggacctgaaacggcttttcttccccgcaggcccaacgtcctagggctagcagcctgtcaatttcccctcctcgaatcaactctacttgcttttactcagctgaactaaacccgcgaaaaatgaaacgtaaaccacatcttccatctgcccccgtggtaatatcttgtcattgagaccattgagaccattgagaccatggtgggagttccgcacagtacaggctgtgccctgtgtcgcgagcgacggatcaaggtcaatatccaccaaagtaaggttcaaggtcctgggctaataaggtccatagtgcgacgaggcagttccagaatgcacccagtgtcagaaatatggccggacctgtccgggctacaggcgaacctttcgttttcaagatgaaggccccaaccttgcgcggcgacatcggtccaacacccgacggaaggggagaagcacattggcaggacccgctacgtcttcaactcgaattaaccaattctcttcacgcggagacccttctgcgactgcagagatagtacgcggcaatgcgattgccctcatgcgccgacaatcctccttgggtggctgggacgaacaattgctggcgcgcaagtccttccgtgccgcgcagccacaattattcctcgacttcatcagcacgtcgtttccaaccttttattttcataacctgttccggtctggcgacacgcccgggttcgccgaaaatctcgtcatgaattatggccaagacgcgtacctcgactccgccgtttgctgcctgagctccgtctatttagcacacttgactcaagacaaggcactcctcaaaataagtcgacaaatgtactcccagtcgctcagggaggttatgcgagccatcccgaaagccgaccatgcaaactctgacaacatgctctgcacatccatcgtccttagtgtcttcgaaatgttcgcgcagaccgcacccgacgcctgggtcgtgcactcggagagcgcaaagcgactaatgataagtcgaggcccagcagcgcacgagtccgggttcggaagatactgctggatagcattccgcgggttcttcatcgcgacggccgtctaccaaggcgagccctgcttcgtagaccaagaagaatggcaatcctacgcgacgaaagtcaggaccgaagactgccagaagcccggcgaatggtctgcatacggagaagtatccgacttgatcttcatggagatcgccaaatgcccgcggtatatcagcgagacccgggatctcctctcagtcccgtacgaggctgactccacatccatcgcgaacctcatcacgcgcataagtgatacttcgcaacggctgcgctcgctcgccgcggacctccgctcatgtatcagcgcgcacagtgagcgccagcagggtatcgtccagcgacccggatcctttgtgggccccgtagcagagagcttcccggacaccgccccgtcgctgctgctcaatggagcggagaatatgctagagacgctagagcagctctccgaccgtcttggtgaccggttgtgcttcagttctgtcgaggtttattcgcccgagtcgtcggtcgtcacgccgcctagcagtggtagtgaatattctatatccccctattctgcgacgtcgaggagtttcgctcttccctttcgcatccattcagagcttggacagggtctttctaaaagctctgattcacatgatcaccgtgctgtgagttggttggatcgcatcgcgtcgtcgatgggtgtcctcggcgcaaaggtcctcccgggtgatgatccaagtacttcagtgcggatggacagctcacctcaagtgtttgaactgcaatagtcaacgatgatgcttgcgttgacatgaaatgtgatacgaaaagatacctgctcctagccggtctaggatgaacttcccctacacaattacgctctactttatatccccaatgtgaacaatgaaactcaggcattcaattttgatcatatcggcgtatatacgtatagatatatcagatgcaatcgcgttctagtaagaaccactttcttaccactaataatccaaagactgctccagcaagcccctcagctcacctctctcagcctccaactccctactcagagtcggcgcgagcataagcacccgctgctgcggaatagtcccatcaaccaatccctccaaatccgcagccttgaagcctagatccttcaatccacgcggctgatcaccaagcttaacaaggaactccgcaatcgcttcgccaagcacctcacccgcactctcgcgcttaacattcgagatatccacaccaaacgcctcagccgcggcaagatggcgatcagggttcgacgccgcggtaaagcggaagacggcgggcgcggtgacagccaccgaaacaccgtgcgggataatagggtgatccacctgatagcccgcatgtttatagccagggttctggctggaaatggggtagctcataccgtggcagagatggacacctgcatttccgaaccccacgccggcgagcgtagccgcgagcagcatctccgactgtgcttcgtggtcatccgggtcgtggactgcgcgcggtaggtacttgactgttgagcgaagggcggcgagggagaagatgtcggagatggggtttgcgccctggtaggcgggccggttgatggggtttgttgggcgtggtgtgcgctcgttgtatgggattgcggtccaggactcgagggagtgacagaggacatcgaggccggaggcggcgtgcacggctgagggcatggtccgagtgttaagtgggtcgcatattccgagggttggcttcagggcccggtgggcaatacccgttttggctttcttggagactaggtcgaagatggctgtgcctgttgtctccgagcctgtgccggctgttgttgggacggcgacgagtgggagcaggggcctgtctactggcaggcctttgcccaatggtgcgttgacgaagtcgaggaagtctgcttcagggaagacggtatataggttcatcagcttcgcggtatcgattacagagccgccgcctgttttcatgttagtttgtgtaccaggagcctaggggttaagggagacataccgacggccaggaaggcatcaggtttatagggcttagcgaacgcgatagcctctttgatacttaatttgaagactcttagtacctataccacaaccacaactgaagctaggcacattgacttacgagctatccttaggctcagtgcgaactttgtcaaagatagtgaactcaatgccctcacgggtcagaccctcaacagcctgcttcatagcatcaagcttggccacattggaatcagtgacgatgcacacccgcttcgcgccgaggttggtaaagtccattccgacctccttagtcgcgccgggtccgaagcgaatgctagacgccgccatctcgaatgcatattccttctcacgcgaggggtcaatcggcgtggacatgcggcgtttcacatggttgagcagagacgaggtttgcttgtggttgtggtggtggctggggttcttgtggcacgggcagttaggtgggtgggagtattgtactgtgcgtagcaagtttagggcacgattggccgctgagggagcgactctgattgcgggagaaaccattctgtgtaattctgtagaatataatcagaagagagtttgggagaagtcaagctgaagtaaaaggtcaagcgactcggaagagaaagggcaaattggggaaaatgcggggaaatgccccggacttctgcccgagatctttttttttgttttgcgcgctctctcttgactcgctgtttactcgctatttactcctctattcggagaatctattcatatcggtctgatatattctctttggtttctccgttttggagaaactcgaatccagtgcatctatatcccatagccgaggttagttacactcaccgattatgacgtctccaacagtatatatccgtctacggatccacgggtgtgcacaataagaatgagtatgtaatcaaacataaaaagtcagatgattgaattgagcagcactatcgtatactagctctcatatccaccaactataacaatcccccaatctcatacccaaattaaaccctcaacctctcagcaaagcgacaagatcaaatcggtcgaagaatcaacagccctaacctgacttccagcaggcggaaccccatcctcccaagaaatcaacggctcggaaggcttaacattcactgggtaacccgcaaatggatcgccaaagacatcagagagatcataccagactttatcctgtctctggcctcgctcccttgtagaggaaaggttgtacgcaaagatcatctgcggagaactggtatacagcccgtcgcggtcggtgctgatcttgattgcgatgccgccagtgtctgcattctcgcggaaaacctcgctgtactcgtcgttcgggaggagagttcgctccggtaggactgtggaagccacagaccagaggtagactgggaacttgcagttgttgtgcactatcgcatggcctaggtttcggtgggtgggtggtggtgtgctgcttggtctcactgagacgaagcttgaggaggggaaggcaccgtaggggatatctctctggccatggttgttgtggattgttgggttcgagagggcgaggctggcgagcgaaaggagggggatgatagttgagaaatacatattgattgattatagagctgttggggtactctttagttatgtcttgcgttagaatcaggaatttggacggctttatatagaatcattcttgttgctgtgtttcaccgcgagcctagttggatctaattcttggcggcaagatgcatataggcagttgctatgaatctaggctcaggggaaattagatgccaagctatgctgtacaccgtagatgtggcgcgaaatgtaggggtgtgaaactaccacaatgtagtagccgaaaagacacatctgtttgtccaacagaaacatatgaagaatgtcaccgtttccccatttagtgcgcatgttgactttgtatccccggagaaagatcggaactcgaggaatgtacaggcctttaattttatattatatgtcgacagggcgagaagaatcaacaaatgggatattctactcatgtctgatcgaagatatggaagaatgtgactggtctactggctccgggtatattaccaaagagaatgagatcaaatccgtatacaaagactatatcgagggattatgctttttcaaggacctttatagtgagttacacccgtggacggcatgacaaactcgcgttaagcaggctgatgcaactatctgaaagtctactcttgatcaaaatagggaatcaaacatcaaaatacaagaccccgtggctagggcaactgtggcgttctagacattcatttctcctgaggaatgtgagctttctataggggagaccacggaaaattcttttgggtttgaaactaccgaggaatgtcagatagaatagacttcagaacaccctgccagagaacacgaattcaaggaacaaaacaaactcagggtagttcatgtggcacgccaaacggtcggtcactcatttgtgatatccccgacgtcatgtccgatgtcccttataagcatcgtgagacagacctaacgttctgtgtagcatacacaaattgatagatgtgacaacatactctgattcaggtcggatgcataggaacatcgctattgggtgtttccgcagccctgtggttcagctagaaagcttaaggaatgacatggctgaatgagatctaaatctaaacaaatatcgacaccctagatgcgtgacaggcttcctgttcttccaattggctgagatcaagacgtgccaagaaaaaaattgtattcaaatatgtgtgacaaaacatctctttagaagaaaaataggtagggcaaggataatttgccatcagaatgaatcgcggacccgcttataacctaagtcatgtggccatgagaccctggtattgtaagccatggttggtggtggttatggagtagtaggcattataggggacatcccggataccgacatactttccgagaccttggtgggaagtggtcgaccggggtcatgctgggtgacgttcttggcggtgcaaatgagagtgttgcaagaagcattctaagtattatggagcatgagtccttgcttgagctgtccggagtgacaaagtcagttggaaatttctgtgaccacagtgaagacttgagtttgaatgatcagcgtaacgatcaagagccgtaggtaaatagcaagatctggaaatcttcctagtgttgagcgttgcgaatcttctcatactcaggcagagcccacttcaccatccattcagattccagattctgctgagcagatggtctattctccggcctgaaggatagcatcgggcgcgatattgagaaaagagcatctcgttcgttcggttcaaaagaaggcataccctcccttattcgcgcttgctgcacgctcgtttcaaagttatcctcccatgagggatattgggattggggtcggtctactggttctccatccttgagggatttttctcgatgtgctttccacgtttacagtcattcgtttggtagcggacccaacatatcgatttgctggcgagtcatatcatcttcgtccgtaaaaaagccttcaaatagcgatctttgggcaatgatctcccagatagtgcatgcaagtgtccagatgtcggacgaaaaggtaagtggcttagttatctcaaagtaagtctccgggggtcggtaatattccattctttccacaccttcaatgggctcatacaagacatggcttgtattcacggttgaatcggtcaatttgaacgtagtgagagaaagtgcacggtgttgaggatgaagatatagcaggctcgcctttttaggaatgagacgatgtgagaaagacgtaaacgaatgtaggggcctaaagagcaaacaggactttctcataattttcgtatcgcgatcaaggccatttgatattgaatcgaatttagtgcattttctagcttattcgccttgtctgtccacttggtacgacatacaaaggaggtgaagaggtgatgttgggtctggggtgactttcttccggccctgatcccaataacgtccgtgcgtctggcacggtactcagacacgtctgtctatgtctcgctggacagtaaatactaaaactgatactactacacactatatttcatgtctcatctactagattttcaggctcaaacaaaataattatctcttgacgttgcaacttatttgcccactaaacgcatgcaaaccccaacaactacccctatgatggctccaacaacaagccctacagctatccacacgatgtaatacttgatcactcgtcgcttagagccgctatgccactctgccatcacatctttcatagttacaatgggtcgttttccacggaaatcacggggctcctgcagatccatggaatgtattggatgtgtgctcgtgtgagcttgctcgggtatcgttggtgccatgatgtcaaggctgtggtaatttggtcttgaccgtaaacctcaatcttattgatagtcaataaatatttttagaggcctcagcaatttgctttcgattgaaactgacatgttttcttcgcgaaatttggtgtcgtctgtttggacgcgtgccggaatcacggaggataagcgatcggaaaagtcccttagaacaaaccccgtaatttgtagcctctagatggaatgaatcacaacttcttagtctaatcatagtcatagatcttgcatctttacgtaccttgctgacttgattcaaacgttgaactacttagaccaacgtgttgcaggagggggttggggggagaagaaattgttagactccgtaatcaccccaatttatgatttatatgctgtagtaattcatgagacccttgaatagctaaacgagttaggcggctaatgctaaattaaccgggacccttgtaaactttaaaaaggatcgacacggcaattggttcgatcgagacgtgggggccgggaagtggatcctctccacagcgggaacccgggtgatgcccaatggaattcatggggccaagtcggttattaaaatgagattttcttcgcctactcataatttgtaacacaccaggcagaaacccctttcaactacgtacttcagagagggtcaaaaaagaatttccatctcctcacttgatatctcatcgccggttacctcgtcgtatcacaaagctacttggctagtggacctataagctaatgtcgcatggtcgactcagtcgggacacagataaccctcgcatatggtcaagccaagattagctgctagtcattttcaatctccgatttactctgagaatatccatttacgcgacgcgaccatggattggttgacaaagttgttcacgggaaaggactcggcgaaaacagaacaaaaagcgcaaaagcggaggagcaaagtacacagccgaagggttcgtgcacaggaaaaggagctccgacgtgggaaggataagggtactgtcaaaaaggcgagctttttctggggatcgccaggtcagacataccagagtaatgttcgtggtccgggtgaaggaatttgaatgggttcggagacaaatctgtgaataaatgaggcgagataaagaagcttcgacttcgtggctgctgaattcgttaatggaaatttctatccgtctgttggacttggctagataatgcctagatgtgtctgatggattcattgacatggacgtagtattattgagaagggaatgagaaatcaacagcggaaattgggactcagtcttggcgtttattggccttaggccgctatatgtatgccttaacatttcccgtgaccacaacaacatcttcccagctcaacctactctatactcttttgagggtgtgatattagattaatatcactcgattttatttctaatggggttagacaaaaccagctatgcttggtgcaaagtcttctaagtgagagacatcgaaatacatggttttgtgggaatgagttgaagctaataaactacagggtttcagaatttgaagcattcatttactcatttcacttgtgctttcctgcctttgagatctgagcctagtatttcaatatgtcgacggtcttaccacatctcgtcggctctgtagacgtccaagcgcatcccctccgtccatgtcaaatttgctgaagaacaacttcgtggtatcatgttcccagtcatgactatgtgaagtgtcgggctagcttggaatttaccgataagcatcacagcgagcggacatgctccactattctgttgtaaatcggcgataacggacaattgttctagctcttgatgatgcaggtactcatctggtggcacccggcgaattcataaccgatgtttgtatcaatcctctgatgaagaagaataacgcctcccgctatcccccgtatcggtcgcctcaagttctgattcctttatcatgcacctcatctcttttgccctcggaatttgggtcgtaactcggaaactgcagctcggatttagaagtattggacttactggccatctggcaatggtcagactgtgtggcaatcggtagacagtctgaaaattccactccaattggctacggagatttcagttgcaatctcgcatttacagactacaagagctccaggtgttcttgtaagggtaacaaatgttacgatcatgagagatcggtgggtctctcttgcctgcgtgggaaggagaacgctccttcctattaggtacatttgtcactttcctttattctcttgtttgttctttcctttccaaggttgtttacactttagctaagcgagacgttcgacttttgcatcgtttgcattagggccaggtatataaacaggctgatccccacttctgcacttacttcttccctctctcttcatcattttgaatcaaccacatcacagcgcaatccatccaacttgcctgccacctgtcgtgtccatcatccatcacatgacttgtttgttcttactatcctttttttcctcataacttacattcatccttcagacaacccagccatatcacaagcatccattcaaggcacctatcatgttcatcatccatcaaacatctcagccacatcatagtgcatcccgtcaacgtgcctagcatctattgagctcatcattcatcacatgacttgtctgttcttactacctcttttttatcgtctacttacattcatccttcaggcatcccaaccacatcgcaagcatccattcatggcatctgtcatgttcttcatctatcaaataactcagccatatcacagtgcatcccttcaacgtgcctgccattatcgtgttcattgtctatcatttgacttgtaagttcttgctgtctcttcttttcatatacttacattcatcctttagataacccaaccatatcgcaaacatcccttcatgacatctgtcgtattcatcatccttcacacaaccaaaccacattctccttccatcttccatcttccactttatgaggtttgtttcttatctgtgttatcgcctattcttcatcttccctcatcgcattctatgacttggttagcacctgatgacacggggctaactgtactagataccacatccactgaatcacatccagccttaccgtgacaggtttcggcttctcgacaatcgtcaggctgcaagaacagcaaacacaaacaaaacaaaaaaaaaaacaaaaacaaaacaaaaagaaaaacaaaagaaaacaaaagaaaacaaacacaaaagaaaataccttggacaatttcaatcaacaacgttcaaacagccacttcaagcatccccttcaagcatccccttcaagcatccccttcaaacaaccatccccttcagcatcaacttcaaacaacattcaatcaagcatccccttcaagcatctccttcaaccaacattcaatcaaccatccacttcaaacaatcacttcaatcaaccatccccttcagcatcaacttcaatcaaccatccccttcagcatcaacttcaatcagccatcaaacaaccatgcacattcaatcaactatccacattcgactactacaatgcttcgaccttaaagaggaggaatgaaaagaaacggtcttggtcgacagagtctccgcaggagtgtctctgaaggagacttctcgtcgggaagaggttacagcgtgtacccatttaaaggagactctcaagaccgtttgctgtggtggtaaaaaaaaaatggtcgcctcgacaagcaagcatcaacattcaaccatccacttcaatcaaccatccaaatccaagcgtctatatccaagttccacttcaaccatctaccttcaagcaaacatccacattcaatcaatcacatctaatcaatcacttccaagcatccacttccaagcatccacttccaaattctactgcagtcaataatccacttcaaccaatcatccaaattccatttcaaccatccaccttcaatcaaccatttcaagtatcctcgctcagccttactgtgacgggcttaggcagcaaacacaaaagcaaaagcaaaaaaagaaaaaaaaaagaaagacaaaagaaaacacgtcgaatcatttcaatcaaccacatccaatcaaccacatccaatcaaccacatccaatcaaccacatccaaccacatccaagaaccacatccaagaaccacatccaagaaccacatccaagaaccacatccaagaaccacatccaagaaccacatccaagaaccacatccaagaaccacatccaagaaccacatcaatcaatcttcaatcaatcttcaatcaagcatccacacttattcaaccacttgcactgagaaatgataatctaaaattctacacgtctccaacctagagctttttccaagctgatataatccctggttatacatagaaaagctgtttgcacggtttatgctctttaccaccttcgtatattgtcgagtattctagctataacaccgagaaggtctaaaaatagatatctaatagcgtagactcccaccagaggacctggggaactgcgcgtatggtggatgaacctgtagagcgagcagagactgatattctatttctagataaattcatcaaaagaatagacgtgaataccttagtgactggtcaaggcatgttagagacaaagaaacagtgttctgctcatattcttctcctcaaacatggcatgcgtgtttcagatatttctttgacctatgaatcggtctttggccttgataccaaagacgaacgcacaacaaagaccatctcgtctagttcgaatccccataaacgccacctccggttctccgcaaacacaggcactctgctcatcgagaggacctccagtcttcaggacaatacaaaatgacctagcaagaaatatgcttaaaaccaaggtgacatcgacatccaaagatgttgcgcagtcctacccctgtatagtcaacgaccttggaccatatactatgtagtggcgtcgcaaattactttttaggaattgaatcagccaaataagacaaggatagagataatttatgtgctgacgtgaattgcaaattacataactccttccatcttcttcatctctttttgtgatgccttgcatttcgtctctttcctcgacatctctcagtcgcaaactccccacccaattcgactcttgtttactctccacaccactccccagtaacacacgaattgacatgaatacagcccacgatggctaccgatcaaatttccaagcctaccgagcccgatgccctgatcctcgaagcttggggccagggtctgatggttggaagtctactcattatggccgctatcactcttgccaatatgaggtcgcatattctcctgcacaagctgatcctcgccgaggtacggtggaagcgaaaagactaactctgtaagttatgttctcaacaggacttggctgattatcggatcgataatagcttgtcctagctatggctcatggtactttcatcttccccaacgagccggtctacggctggtatctatctgtgaccgcggtcggtctcaacatctcctgggctctgcataatgttatcgcctggatgaagaaccgtccattcctgtcgcgaaaggtctcaatcatctacattaccactgttgttctctgctggccttattggggtctggagatctatgccaacttcacatacttcaacaatatcaacaaggtcttcttgaagaccagaccaatggagccattatttcggttggtcatttcaattcctcgcaaatatcgaatgcagctgcttcataactgagtcctccactctaacatgatctaccaacagcgatccgtggtggatcttcacaacagccagtctattctggactatcaagcgcgaatacaacttcggaatatgggagctaatagtagtcagcccccgcttcggactcatgctggtagccatgtgtctgtcgattattttcataatcgttgatacctgcagcgtgttgaaagtcttctccagcatactcccaacaggcgtcgagccgttctggaaagtaagatcccatcgtccgatcttcctttgtcacaccaccctaaccatcccagctatcttttatcttcaaatgtctctgcgacacggtcatcctcgacgacttcaagactgccctcgataacttgcgcgttcactggatgcgcaagaagaacagccagttgttcggtagcccgctgtccaccccgacctctactccagactctagccctcgtgcggatagaatacgcagggatattgagacttgcgattcacctacgacccctacaacccctacccctacgaagagaccttacacccgtgcggtggatgttcctgcgcggagggtgcgtgacgatgaggttgttttctattagccggacccttcggcttcaaattgtgcgttgagaatggtgttcggggcttttagtctggtttcttgacctcggcggttctgaggttgttacgacatacccggacggatagactgaagttattgcgattttacatcgatttgcctgaggagagcgatttatttcaaaagaaaaaaaaaaggagaagcctcggggtcagatagttaatgaaacatacaaatcgtctgcttttctattagtagacattctgccataggtgagatctgcaatacataaaccggagaattgattcggagaattagcatgtcttcatgcagtgtcacatctataagttcttttcctggtctgactagttaccaattatgaccaatgataaacggtgcttacgctttagcgtactctatttatccgagaatgtctctgcttaaaggttggatggaggttgtatacacatcattgaccacttatatctggtattttatctggattggagaacaagctggcaatgcagaaatttacacactcgaggatagtacatcccacgcatcactcggagaattgacggattcagatgacacgacatcccacgcatcctcaatactacaattcggactcgagtctcgaatataaatatagccatttcgcccgtataatacccagactccaatctcttactccatactccatccaatatcccctttgcaacttaacatccaagtaataatggactccctcaacattccacagacccaaacagtcgctctcgtccgttcactgggtgggcaagtcgaattcaaaacagactaccccgtgccaatcccgggacgcaacgaagtcctcgccaaagtgctctacactggcgtctgccagagtggtatgtatagtgtcatgtaacccgaccgacatctaacgggatgttctctcaacaagaccttcctaacaaaccaacagatctacacaccaaatccggtaccgcggcaggaccagacggcaacccgataacaaatatcaagctgccacacgtgggcggccacgaaggcatcggccgagtggtcgcgcttggaccggatatcacgcacgccgcgggtctgaaagttggcgggctggtcgggatcaggttcgcgagccgcatctgtcggcggtgcgagttctgtcttgcgggtacggagcagtactgcgttgagagtacaaaccatcttcaccacgaggatggctctttccagcagtacatcgctctcgatgcggattacttgacgattctgcctgatgatgttgatccgaaggtcatgggaccggtgctttgtgcgggtttgacggcttataaggtgggttggggattttgctttcgtggtctggggttaatttgtggttgattaggccgtcttgaacgcgaatgttcgtcctgggaattggttagtggtcgttggagctggaggtggccttgggcatttggctggtatgtgttcttttttgtggtactctggagatacgttgcaatccactgacattctccagttcaatatgcaagagctcaaggggctttggtaattggcgtcgacactggtcctggtaaggaagactttgtcaaaggtctcggcgcgcaggaatttatcgactttgccaccgaagaccctgtaaagagggtgcaacagattactgggttgggtgcacatgctgctgtggtgacagcaggtaatgcaaaggcgtttgcatatgcctgtgatatgctccgggttggcggtactttgagttgtgttggtattcccccgggaagaccgagcttggagactcctatctgcacgattgtgatcaagggcctcaagatcacgggtaatctggtgggatcgctgaaggaatgtatggaggctgttgatatggtacggcgtggtattgttaaacctgtggtcaaagtccgaccgttcaaggatttgcctgaggtatatgaggagatgaggaagggtgatatttcagggcgcatcgttcttcaaattgcagaatgatcccgcgaaaactttattgaaattcagattatctgagaattctgttgttgaagccaatccaaaaaatccgatgtcaagttcctttcatcgggctcgctgtttggtgtgtatcctggaatctgagcctgaccaccaggtccattttcgcccgagtgaaggccagaatcttcctccccgattgtcaacaggcgagctggagctgcaactagagcttcagcggttttagcacgaaggattgacttcaacatggtatcctgctcgagaaagggatcaatcttctggtataatgcatgcaaaaagtcctgtggtcctagttcaagccgagaacttattttgtgtgaagacaaaagaaccgtatccgccagggagttggcaacttcaaagcacttcaataactgtaacgagccattagccatggcttgtgtttctgtatatcaaggctactagcctggtctcgtcccaatggtagcaaatccgtctcgctgaaaccccgcaaggcctggagtaaggcgcggccaacttgcgctggaaatccaaatgccaagacgggttcgcacgctgaagaagatagcaagttcatgttgagtgcctcctgccagagaatagtcctcatccactcccgtgtaatgtggtagtctgccgttcgggtcgagacatgattggccatgctgaagcatagtgaggcaaccttgacctcggtgttggtcagatgtgtagccatgatgatcccaggacgcgagttgcgccgtactgagatctggtcaaacgcaataaagagcttgacgagttctagcaacccttgggcatgaacatcagcattcatatccccctccaaatgtatcaatacaggggggtcaatataagacggagagagacccaggtgcaatgaataacctctgtgatagttagtaatttactctgcgaaattgaattctctagcctacctctccgatacccaaagcagcggaaataccaaggcctggtttgaaatcacctcatcttcctcgtgtaaaatatcctcattcaatcgcagaatacgagctccggtcatggcctcctggatgaacatcattgacgaatttcgttggttgaccttggcgtggtacacatgcaaaaagaaagacaccagaacgcttctgagatccagatttgctccatggctgtcgcaacttgtacgcattcgcaagcaagcctgggccattagcgtgctatctactttctgagatccatataccgagggatcaagatgcaactgagccatcgtcgcggcacagagggccatgatgagacaggaagtgttcccagcattggagtcaactttctctgggtatatatcctctactcttctcaaaagagcttctgcgttgactacaggccagacgctgtatgaatattgctggtacagacggatcaccgacgcaaagactgtctttgggatgcaatggaggctgcaggctgtggcggatgaagagatggtatcattgctaccgttttgtatgtatgtatcttcttcaacattctgctgaatctctgtggattgaatctccggaaggtcggtctctcgatggcatactctgcgagatttcgggcccctcctgtgggcaggcctcaggtacgtacagcgcacccgctttgctgcaccgcggcaggtatcgcagggccatgaaccgctgcatttcactttgcgggagatacagatatcgcaggctcgtttgggtggcataaggagctggatttggaagtgtcatgaagaaagatgtcaccttgccaagcgtccaaaccatatgtacaatgcggggaaacattggatcttttcggcacctttgccggtatctgctctcggaattagtttttattatggcctagtggtaaaataccagttcataggtgggctcggccacccctgagcccacctgccttctggtaaattacgctgcacggatttcgtcagggtcttttatgttggagaggttacgtgacggcgtattgggagcgctaaacccaaaatggcaagactgacctgatacagtaattcacaggtccgtcgtttagttacaaagtagaaatagcctttgctcccccgaattaccctctgtcctcaaacttttcttcatttacacacatactccgtacctaagtaccaaatcaaacctccaaccacatcaatcatggctctttccgcacccagcacagacgtgagtctcccatgctatgctcccaacaagccccagaccgaaacctaatcaagaaacagccgcaagtcctcatcacccaagaatcaagcgcggaacaaatcttccacagcttcacagcagaaaccgcttggcagcttggaaatgcactaagggaccgaatcctccgcctcccggacggacagcgccagccggccctgatctccattacgctcaccggcggagccccgcaccatgtggtgtttcaggctgtgaccgagagcggcacgatcccggacaatgagaactgggtgcgacggaagcgcaatactgtgctccggtggggtctttcgagctggactatgagacagaagactgttagtgggcttgcggctaatgcgtccgccgaccagattgaggctgcttttgtgaagaaatatgccgttccaagtgctactgggggtgctgttgcagatgagtatgctatccatggaggtggctacccgattcgcgtgcgtggcgttgatggcgttattggtgtcgttgtcgttagtgggctgaagcaggaggatgaccatcaggttgtggctgagactattcaggcgttcgtggctcagcaagcaaaatagatgtcgaggtatgccggtacacgatatatttcaatcaaataaatttatataagcctgttaataggcactatctataataaaagaatgcgaggtatcatttgtattgtattcttagccggcattaatcaaccaggcctgaaagttggagacagtgccccgtgtaaattcgaacacaaaaaggggactcaagcaaaagaaaaaaagtggaactccatgaataatgcctcaaagataattttacagttcgtcgtggtcaaggggctcgtcatcctcatcaggaggagaagcagagccgtacagcttgctggtgatggggtaagccacactggaaagctgctccttctgctcctcaaagtcctccatggtagcggtggcagcgttgtcctcgagccagtcgttgacttccttaacggcgtcgaggatggactgcttgtcatcctcatcgatctggccacccagaccgttctcatcgttgacctggttcttcaggctgaaggcatagttctccaggctgttacgggcctcgatcttgcccttgatggccttatcctcctcggcatactgctcggcctcctggaccatgcggtcgatctcctcctgggagagacgacccttgtcgttggtgatagtgatagactcggccttgccggtgcccttgtcggaagcgctgaccttgaggattccattggcatcgaggtcgaaggcgacctcgatctgaggaacaccacgcggcgcgggggggatgttggtaagctcgaacttgccgagcatgttgttatccttggtcatcgagcgctcaccctcgaacacctggatcaagacagtgggctggttatcggcggcagtcgagaagatctgcgacttgcgggtaggaatgacagtgttgcggggaatgagcttggtcatgacaccgccagtggtctcaataccgagagtgagggggttgacatccatgagaacaacatcgaccatggagtcatcgccggaaagaataccaccctggacggcggcaccgaaggcaacggcctcatcggggttgattcccttgctggccttcttaccagcgaagaactcctcgagaagagcctggaccttaggaatacgggtagaaccaccaacaagaacgatgtcatcaacctcggacttcttaaccttggcatccttcagaacctgctcaacaggcttgagggtcttcttgaacagatcaacgttaagctcctcgaacttagcgcgggtaagagtctcagagaaatcctcgccgttgtggaaggcctcaatttcaatgcgagtggacatctgggaagacagagtacgcttggccttctcaacctcgcgcttcagcttacccatagccttaagatccttcttgacatcggtgttgttcttcttgttgtactgcttgacgaagtactccatgacacggtggtcgaaatcctcaccaccaaggtgagtgtcaccagcggtagcgagaacctcgaaaacgccgttgtcaatagaaagaagagacacatcgaaggtaccaccaccaagatcgtaaacaatgacctggcgctcatcaccggtcttatcaagaccgtaggcgatagcggcggcggtgggctcgttgacaacacgaaggacgttgagaccggcaatggtaccggcatccttggtggcctgacgctgggcgtcgctgaagtatgcggggacggtaacaacggcgtgggtgacagtcttacccaagaagctctcggcgatctccttcatcttgccgaggatcatggcggaaatctcctcaggggtgaaggtcttggggacctggttgacgtcgaccttgacttggggcttgccatccttcttgacgaccttgaaggggtagttcttgatatccttctgaatatccttgtcgtcaaacttgcgaccaatcatacgcctgcaattcgttagtgctgggttcttgctgtgacaggtgtaatggaagcttacttaatatcgaagatggtgcgctcggggttggcggcgtattgattcttggcggcgtcaccaacgaggcgctcctcatcggtgaaagcaacgtaagacggggtaatacggtttccttggtcgttgacaagaatctcgaccttgccattctgcatcacaccaacacaactacactcaaagttagcaacctgtcacattgaacatgaacaatttccagactgaggcaacatacgagtaggtggttcccaaatcaataccaataacactgccgtagctctcaggggagttctcctcctgggcgttggcggtgtttccaaagaaggccaaaggcgcaacgagcacaaagagaagatagaagatggtggtccaagcgaaaggcttagacgcgccatcgcgtgcggataggcgagccattgtgagaggtgtatgtataggtatgtggatcgagatttttcaacacaaagacaaagaagctgttgctatgaaagctccgcgcgtgccgctctaaacagctgcgcagacgagtaaacacaaggcgtgtttgactctatgaacccttatgttagtcgatggtatgtgggaaagggacccagggcgaagtgagggaatggtagaatggttaggagaagaatcgaagaaagaggacttcttgtacgcggatacggcccagcggccatgctggccttttcccagttcaggtcacttctcgtgctctgattggctggctggcgtccggcagtggctgactcagaaactgccacatagacacaccgccttctttaataggccctgaactgcctaaaatagtctagtggcaggggtctatccacgaactgctcagggtttccaccaatcaacgactgccagatgatcgaacttgctagaaggggccaaaggtttgccccttcgggagttctagtcactgctactgaccacgtgttactttatggttctatgctacattacaacagcctaattgtgtgtcgatcaattgatgataacaagtggcatctcaatggagagaccaggtgaggtatgtcgtatccccgtactgcgggcctagatttgggccggggatctcccgagtaggtgggcgtggcacaaagcacccaccatgccctgggtatagagctttccgagtctaactctaatggcactaccagtgatacacaatcgaataattactcaatgattgagcttaaatctttctatagtagtatccgaaatcgtattcaagacataatcaccagctggcgagctctaaatcgaatattattctgtgatatatatattttttcagtgtcttactctagatgaacaataatgtgccaccgacgacgagaaattgtggcatatcacgaataagatggatttcgattaactcaacttattccaataaaccagcagccactgttgagcctcccgcgcgcaggacaatcctggtcggtgcttctagaggaacagcttgatccatttcaaccacaacacgcgccacgacacccggtcccacaatcttagggcgtttcttgatagctgctcctgacgctttgtccagagaggcgaccagcttgctgatgcggcccggtacatgtagacggccacggtggacatccacttgcatgggcatcaggtgttcgaaggccagaaccttggcggtgaaagaagtgatggtaggaatgggagaggagggacggcagacaacgtcaccggaacggaggtgaatagggtcgatattggcgatgtttaaaacgacgttttgacctgccacggcccagtcacttggttcgctgtccacctccaaactgcgcactgttgctgtttcaccactaggcatgatcaggatatggtcgcccatctgcaaactaccggcatcaatacggccagagatggaaagcggactttgcacgccacctcggaagacatcaccaatcgtcatacgcaaaggcttttcgagggcgtgtgtgtatggctccgacgtttccagctcttcgatcaatgtgcgacctgtgtaccaggatgcatgagggtcgtcagtccggcgagaaatgttgtctcccagagaccctgagcacggcacaaatgaaatgttgctgtcctggaagcccgcagttgtcaagaacgcggagatctgctgttcaatctcctcgaatcgttcatgatcccattgcacggtatccatcttgttcacggccaccacaatcttttgaacgcccatactgcgcaccaacagagcgtgttccttagtctgacccttcaaccccgactcaaaattgcctacactggaatcgatgaccagaacagcgaagtctgcctgactggcaccagcgatcatgttcgggacaaagtcacggtgacctggtgcatccacaatggtaaaggccgtcttatcagtctcaaactggttggtggcgatatctattgtcacgcctcgtgctctctcctcagacccttggtccatgacccaggctagcgcgaatgagcccttgccgatcttctcggcctctcgccgatacctatctagtgtccgttggtcgatagcaccttgatctgctaacaaccgtcccatgagagtgctctttccggcatcaacatgacctatattggatatgagtcagtccagggcctcaccttgttgccagtggagatcgacttaccaataaccacaaagtttgcggaccgcttgcgggtggacttcttatactctgatataacatcaagattcttgctcttgactgtcactttatcctccactgaaagatccttcatgccacctgccagatcagactggcctttcttcaccgctgccgatttcgatgcggctgatttcgatttcatacctacatattattaggcaaatgcctttaaaccttcctgcggatcgccaaacctttcgctgtgttctgtgcattgagaacgacatcgtcggggctgggcgctgcaaagtcaaaaggttcagcatgatcctgtccatagatcctcaacaggtctgaactgttggagtgtaagtggctgggctcagctgctgtcgggcccgttgctgcgccaacgatagtgctggcaaatgttgagggtgaggctcgaatagtaggcagtgtttgctgggaaattggttcctctttcgcttcaagcacctcccgttgcgttgattccgaagccttagacaccgatggccttctgttctcggaatcgggctgcttcggtatagaatgcggtgagcttggggttgcgacatgacggagagatccagggccctctgaagcttttggtgtcgacctcccgctagctgcaagtctgtcacgaagggagcgcgatgcacccgaatgatcaagcgaggacgtcttaggttgttcaggtttaggagttgacgaagtcgaagtctccggtagggatggtgttttctcggcctctttcttcttccgggctgcagctagggcggccaatttggaaagttttccaccattttccggtgcgcctcccaagagccccaaacgtggaaaaagcggctcaatcaggatatccgattttcgatgagagggaacattgagccagggacaatcgcgaaagaaatcggcagccgaaaagtgtgctgtagaaggaggagcagggtatgctggcactggaagacctgttagaacattgttcaagcttctatggtattagtttcgagtctctatatatcacatggaatgtatttgcaccagatacatacagtttcattcgcaaggaatagcagcactcctgatcgggacgcgcagaatatcttgtgccccaaagcccgagcccagcgacgacactttaggataacaattaccccatgaacactgcttacctgattgaatcttcgatttctgcagcttcgtagcctccttctctctctttcctgcatgcagaacttcggttagctaaatttgacaacaaacaatcgaacccagagacccgtgataggtaatatgatgtgatatgcagtatctgcgcaaattgaacatacctctcaaatagttgaccgatttctcaatatcattgtagtagtgccataatgcgtcttggacttctcctttcgtggcggtcactgagggttgcccggcaccgagctgttgcaaaacagcggctgtacactgttgcaagaactcctgttcctctgggtcagcgggtgcatcctcgtcatagaaatcgtcatcgtcgtaatcgatatccttaatacggtgtcgcgacattgcggcgtaaggaggtggggtaataaatgaggggtttgtaagtgacgaagatggtcaattgagttgagttgaccgccttccgcacggttgctgagtttattgggtttatatagcactactgtaccgccttcttatacgggcataccacccgttgttttccaactcccgacttggtaggaaattaaactgccggcagaacatgggctacgtcatgtcatcatccatggatccatgccttcaattggctctcatttctaatctgaagacaacatagctttgacatatacattgtaacattaatgtcgaatgcttcaggtccagcttagtctatccttgggctagaatctttaattacaatacatattcaactgtccagcttcttatacaccctttcattcggtacttttctttagaaatgcaatatctgtaagatcaatagtgtcatcttttatccgaatagcttcataaaactaaagcatagcagcggtatcatgtggcagacctttactctatggctgagggcgggtgtgtagctagtaatttgaaagtgtgtgtatagtaagtctcgtatatccttgtagtctaaaaaagctacattatagttacctacgtatccatacgctgagtttgtcatagttatctaactttcgcgacacgcaggaagccgaaagagtcaaaacagagtgaaaaaaaagtaataatgttcatctatcgaagtggactgccaaaaaagtcacccgtaccaggcccagaaaagctcccattactcggggtcaaggcaatggatcgccggaaagcctggcgtggggtggtaggggcactgggggatccagtgatgggaacggccgatgttgtggtgactggcaccacggaccgtgtgtcaggagtgctaggagtgttgcgaccgctgtcattctgcatggtgacagcggtgccaggtcgagagagaacggcgacagtgcctccattcttaggaggtgggcggaatcctagcttcgagccttcgcggaagatctcttcaagcatttgcgagacaatacctgcatcctcgtattcctggaattttttccagagacgtaaagccatgcgagcatcctcgatcgaatcatgaccttgtacggtttcgggtgagggttcctcttgtatatgctccttgaagacagcccaggccaggtacctgagactgagacgccggttcttcccggggtggaagaagaggtactgtgtgtccacggtttgtgccttgggcacttgaatgttgattttgcggaaatcagaagctagaccgtgaccaacaaatatacagccgaggttgagaagcagccaaagcttcttgtaagcaaccttgagtgggacaagattgtgttcactggttcgcggatccaagtcaccaggcttgatgccggaatattgggtcacatagtccacaattggctcacggatggtaatatagtcatcaatgaaggggactccttcatgaacacccacaccgcgcaagacggaaacacgggccagcccgctcttgttggggcgtaccatttcctgtgatccgtctgctttgacgtcaatctcggctttttctagatcaacaaactcggtatccaatgcgacaggtgtcccgggctttggcatttcgtcctcagtgagagtttgacacgattcaaccggacggccgccactagaacaagacgactgttagtatttctattttcaagcttattaatgtgcaaaaacttacttcaaagaccactcgcggaatagcagcgttttgtcgagaaggttcttccaagagtcatctacgacatggcgtgggtctctcacttggtaagccagcacgcaaggttgtttccaaggctgcgtaaatcggagcgcttcatctctctcgacctccgtgactaaaaagtcattgaacaggtgccatttgccttgttcttcagactcagcacccgaaatggaaacattgacgaaagacaccaaatgggccttttgatgttccgggatgtcaatttctgcaactaagccaatcagatcatatactgcgagcccgggtgtttgattttggattcggaggcgaagatcatcaccctcaaagcacatcacctgtccactagcatcaacgagaattccaacggcgtcgggcaaccaccctgggattgcccaaagccgacggccgannnnnnnnnnnnnnnnnnnnnnnnnnnnnnnnnnnnnnnnnnnnnnnnnnnnnnnnnnnnnnnnnnnnnnnnnnnnnnnnnnnnnnnnnnnnnnnnnnnnnnnnnnnnnnnnnnnnnnnnnnnnnnnnnnnnnnnnnnnnnnnnnnggtggcccgaggggcgacggcagagagggttggtcagagcggcattgaggacgagaatcaaaggcatacggtggatggtcttgcgaatggtcacttgctggtagcgacgacaataattgcaccatcctcggttttgtgtctctcgctcgatacttgcacgtaggatattggagaagcggaaaagcggattccgtcgtgcgtgtttcatgtcgatattcgggtaaatcagttcattggcgagtgaatttccagggcgcacaatttcgttctggcagaacatgcatcgaatagactcggacgcaatggtggctaagcgctgatcgagctcctcagaattaggctgaatcatccggaagtcttgagctatttgagtcaagaaaaagcgattgacagcttggatcgcagttgagagagatttgttggtaaggttctcttccaagaggcccagatttgaggcttctcggaaactgctgaatgtcttgagaaggttggtagcctgacaattctgcccgcttgccttctcaagcatgtcgaacaaatagcccagttcacacaagagacagtgttcaaaaatgcacgatccagctgcatgattcaaagcgagatttcgaaaaagtgggatgaatttgaaaagctggagaagagaattagtaaaagagttggcgatgtgagtctcaagtccggagaatgaggttttgttgtagaacctgtagcaaaggtgagcgaagggcagcaaatgaataagggaaggacatacctgaaatcaaagtcatcgacaccgaatcggctgtatttgatctctacgttgctgtatttgagtaatggatcgtcatcgctctctccgttgatcttcgcccctgctaatgcctctgcagtatcgctaaccaagccatccgacttgctataatctcgagccttctcactcagaaactttggggcaataagagctggctctgccatggtcaatgcacgagtgttttctatttggtatcgacgagtctttctcgggtttggagcatgatgtcccatctctgcggggcgtaaatatggcaacatggactgatccagcggagccgccggactgccaacctcaaaaagcaaatggcttggccacgccgaaaagagacgttcgtggtaataaggcatcccaactatgttcaacggagattcggaagaccactctacttgaggaggccgggtgggaacctcggcaaattccgtctccttgctcaattcattgaaatgaaccttagtcggtgagccccataggtgaatggagcattcggcatcgttaatagccaatgcttctcctgatggtgacaggtcaataccgagcacaagtgacacattggcttgtctcaagttgaccgaattgggattcatgagatctatcacttggagttgacctgtttgggaagccacgaagctcgtggtgtgaagtttgggatgcatgcgtacgtatgctgctccagcatggaacggaatgggaggcagcggtgtcaaggttttcaagtcataaacgttggccagaggatccacgattggggacccgagatggcggaccgagaagccacaggtgaccagaaggtcattccgcgcatccatgtcattaacacctgttccatgagctttccatgacttgacaacgctgaagtctgagagactgagagcattgactgatccggtatctgttgcagcacaaagatatcgactctttttcattattgtgtagccgtgctcggtgggcagcttctcgacaattgtgcccttgtcaatgtctaccgtgaacatcacgcgctgagaacctgcaacaaggattcgattggtctgggcggtgaaactcatacagcggaggtcgaccatctcatcgtgggtaaggtgccactgcgtcaagccccgtcgagtaatcatgtgcacactctttgaggacaacgaaatcacacctcgttcgtgaaatattatctgctgtactgcaccttcagaaactggatgggctcgaacagaggtataacgttgcaattctggtccataaaaggaagagaccctgccctagcgaatcgaacacaatcatcagcatcccgcctcggaaatcggcccgacatcaacactcacatattcattgcctgtccataaaagttccatcatatcgtcaaatgccgtcgctgttgccacagtgggcatggcatggggactcggcggcggcattggaatacgcgacagctcatcccagtcggcctccatgcttacggttgcctctgcggtccaaccccagtaccgtaattatattgtgtgttcggtcttgttactctcggtatgccggtctgatgggcctggtgtaaactgctgtctttacccacgtgggaacacggcgagtgtgggcatcgttcggcgcgagggacgcgattgcggggaagctatcagacgattcggcggtggggttttgacacggtgagaggtttagagttaaaagggcattacacttgacaattgaggatcggctcgaaatgcctgacacgatgaacaaggaacaatcggactccaactactgtgtatgttgccggcgaagaacaggaacggtgagattggtttaatcacgtgatgaccgacaagattacaagtcaacacgagagcgaagatcagctagttagagcaatgattacatgcgaagaagtagtttttttatttcttccaagaacagaagcatgggaatagagccatcagttagctctcattggaagagaagtgggttatatgtatcgaatcctgaagcaaacaactggcccaaaatcaccaacaaagaaccacatccagtatcgtataacacaaggggggtttcttgaattagaatgtcacgaagggaatagaccacgagataaactcctctcgatgcgctctatggaccgttaaacactttctcaatctccaaccagtcgatgtagtcaaccccggtcagtggtaatgtcggattatggaaactagaataaatcccttctgcttccccggaaagatctagattccagtctccctgcatatcaaacattgcgtctgggacatccatgttagaccatggctcgagtaaactgatttcatcttgatggtcaccccggccacctgaggctacagtcatgtatggtggaggatctgaggaagccaacaaggcatcttgtcttgggcctagacttattgtatatgtctgggtcgtgtctcgggtagctgcatcgctgtgcgaggtatttgcatcgaagacatgattcggccaaacgtgcgaataagattgtgcaatatcctgcaggcgtcgctcggcagctagattgccagactttgatagaaatcgaagtacattagatgcttgatcaagcgctggcggtggttgactctgtgatttgtccaaaaatcccaccatgaccagaacaaatgcagcggagaatgttgcgtccagatcaaaaaagccataccgggcttgtgtttatgtcagctcttgatttgaataactaaacataaactgggggatgtagggtctgttaggttagagcactggaaggactcacggatggtttgctggagacgaagtgattcaagtattgcgagacttctggtggctgcctcgtcacacgtatcacagagacgcagcagcatactcggcgccggttcagtagatcgcgactgctgttggctctgagcttcaaaccgagctctttgaagtaatattggccgtgtgcataggatgatggcctaataacgaatcaggaacaataccaataatattttctgttggtgatcgtcccacctgaaacagcattaggtacaatgatgcacctgtgcgagttaccgattgtaaaggtcgattgaagtccaacaccaaagatttagggaatgatcggcctgtgtcatgcagttcttggagaattccctggatcttttggaccaattccagttgggtgattgacttatttccatatagagctgttgtaggtgtattagcatgatgccaatagcacaacggtgtatatcctacttgacattatatcatcagtgacacgcgcaatacggacattgatggcaagggcaactggcgactggaaccccatcgcgttccgcgggagttcagttcgtagctgtcgttcatcggctcctgcagccagcccgagacctgaagagaggcgcctagaagtgtaagttgagtgccaagcccctaaagttgccaaagggcctacctgtcgagcatgtacactgtccaccagagtcttaatctgtgggcactttgagaagggaggcagcgttggtcgacttcccgcagattgcacccaagagcaatagcaagccgcagtgcgagtccaatctaccacacgtcaatgatactgtgcaagagcattgtggatcttacacaacgtacatagagatatgcatcatgtttatggtcacaccactgaagatatgtagcaatcagtgtcagtatctcgacggcgacaacaccttccccacccatatgatgcaacggaggaagacgcttcaacgcttcagcgaacaagtccgttcccggtgtctgtgatgtgggatgttttacatccatgagctttgccatggccatgaccaaaagatattctgtaaaccaaggagagttgatctgctgttgtcttgtctccgggctctgaaatagcaacataagatcgtccgagaaagatcgtgggtcaaagaaatgctggctcacgccaagatagaaaaggaattgatcaagcaagtgctgtgattcttccaaagacgggaaagctactccagcaacattgtcaacgagctctttgaccgacgcccactgaggtaaccgatcagcccgatattgaaaatttgaagtagatccatggaagctgcggtcactagaatgcgacctgtcaagaagcgatctaacctgagactcgaatgcaggcccggaggtcaggtccgttgcttcgtgtagagtcagttcatatttgcaagcagaccaggacgaagaaagcgatgtcaagttacccggacttatagaaggatcgttgtcggtatataataactcagtttgcctctgactggaagaacttcgttgcgcagattgacggcctggggtctcatctggtactactgaagaatgaaatgaagagaccggagcccctacagtttgagagctcagctgctcttcataggttcgtactttttccaagagatgtttcacttggctatttgccaatcagcaagactagccagatcatacgacgcatatgaacgtacgcttcagaaaaccgtctgcggccggaatgaccgaaagtgcattcccagttgtgtttgatacaagcacgacaaggtttatcaccggaacattttactttgcgttttcggcatgtttcgcatctgtccggttgttatcatacatgatcccccgcagccggagatgcagacgcattacacacttacgcgttggtagatcgtgggctggagcccgccatgatttgcaaagaagaccgcgtatagctgattttgatattgatttgatagccacatttcagtcacaagtgcgaggacgtgaacgtatggatcgggggttcaaccgaggctgcggggacatcggcctagttctccgagggcacccgccatcgaagataatcaaacatttccacctgggcatggttggataatgcaatcaggatgaggatgaattgatatctgcgtccgaagtccagtcttcccccgcgaaaaataagaggactgcctccgccgctatcttggagtcgtcatcatcatctttgccaggcacaacagagcgcctgatattttctaaatgcgaggcaagcaagtccgcaggccagtgaaattgatttgcaaattgatgacagagctcagcagtggcgaatgcatcgaattcaaaatgaccttgtaatgtgagaacgtggccgggcttgtagaggccgtggattggacagttacggctgcttccgatgttgagccatggttcaggcagcatcatcccgggaactagtgtgtcttctggtgaagatatcacggcatcaccgtggatgatctgaatgcggaatggctgttctggagtaaaccgagctagaggcgggacgttggagacgaaagctggattcaagatgatagggtgcatgccaatttcgtggccactagatgaacgttcgaccgatatcttaaatgaggatccttggggcttgtagcttttgtcacttgcgaggagagcttgagctataagttgatgtccaaagcaagatccgaaaatcctcaccataggatagtcgacatacaccttctcaacgaaagattgcaagcctagaatccagtgcaacttgtcatatactgctgctgcagcttcagtgaccaggatcgcatcgacaggatctggaaagccactgggtgcattttccgtcgacgaccaagggctgactcgtaaggactcgagatttggaaatgaccaaccaacaacgtcgaacgcagtgattctcacacctaaagatcttcggtgctggtggtattcgcttgcattgatacgatttgcggcggcagtgagaagaagtttgaattgtgagctgtacagtcctcgcttagcgtagacagggtagcaaggaatgtcagtgtcaaggacagcaatatgtataggacggacagacatgttgatcaaagcaaccagtgaaagacaacgaagaggagagagaatgttcagattaggcaaacgaacaactttccatttgtcattttgtcggataagatccgaagatgtcgggacagatggccgatctatcgaatagcatgttgttttaactaaagctctttatgatagcctttgaaattctttgattggattgaaacgctttagatgtagtagtatataatcgacgatgacagtaggttactctatacaattgagattcacacggccttaagaataccgtgagggttcgtttctttctttctttctcctcccttgttttcagtcacgcaaaacatttaaatccgcttcatactttcaatcaacgcatcgcgtgtgtcaggagtacgagtggtctctcgtatatccgcgccgagtatcatgcctgcctcttgattgcgagattcattacctgaagtctcaaatgtcttgttcgtaacgaactcatcagtgagatcatagcctgagatactaggctttgaagggtagatttgtgcaagtattcccctgcagatggccataatctttttgcctctaccttctcagcggtatcaccgagttttaggcgctttgcattcaggtaagaaatcagaaaacggaaatagacgtagctccaacacggccgtttatctgagaggattttcaacgggcggagatcaacgtgctataacactatgaccctatacccttcaattgttggtctggtcatttttgttacgagccaattcgattcagaagaaaagagtgcaattcaaaccaagttctaagtacgaagaagaaaggaaaaagagaaactatcagtgtgcgcgttcttcccttcttataccctcgcgtttgtctcgcttagttcccgtttgtcaatttgggaaggtacgaggacgtggttcctgcctcgtttggcaagtacgatctcaagtacgacccttcctggatcgtcacaattttgacttgagagagagttttcgacacaaagaggctggatcagctttgagtcaacagacgtgaggtgaaaaagtctgaaatcgtaagctgcaagatcaaaggataactataaccttagaaggtacctatataggtatgggtccgaagcctaatttggcttaatggcattgtggagaggaactttcttcccagtgagcaggagcatatatacaaaacatgtaatcccaatgttatgaaccgtcagtatgctcccagcgttagatccttaactgccttggattgtgtaaaggtctaagtcgcaatatgtgtgaaactattccccccagcatggcatataatgttggcactataataccgccttccaaatctgtccacaaaccacctcttccgccaacttaacaccgccttaaccccgatatcttcgctttctcacgcctattcacggctactggcgtctacttttgcttcgggatatccatagtccgtgatcgtcaccaacctttgcttgctgctgcctcaagccactagggaagtataaatacctggtcctcccccccaacttgctgtcttttttctttcttctccatcctagtgcaagggcttgacgcgtatcagtgaggagacatccgagatcgtgtttttgctagttgaaaactaccaacttgactgcttcaagtgagccttcgggctcgcttgggaatttttgaaacatgcttacctcaactccttgactcttgagtcctcgagttaaatcctttgaatgtgatgccatgatgggtatttgactctgtcctgagtgtgcgatcacatgccatcaggttgagatctttgttttgtttatcttcgcgtaggggattgtgtttgtatagatcgttaccataactaccggtttacttcacatattacttccttccttccctctatagtatgatgaattgaatactcttctttgaacacctgcctcagaacatgatgatctaataatctattcccatgtagtagttactaggctgcacactctataccataaccctgctatcatttgtctttcttatacaaacaaagcatgaacccacttgctttgatatctgtttacccacgagtttggtcttccctttcatcaacctcgggcaaatgaagcctagaatatccctctatttattatttgtacctgatttacctccatcacttccccgataatcagcaagaaaaactacatctacacacaagcatagtcatccatctctcaaccccaaaccatgactccaagcaatccacctcagcccaaaaagtccgctgtcaagcgaggacggcctgcaacaggctttgataaaaaccacgagtttctactgcactgccttactcaatcaggtgtccgagtcagtcatggatattcagtcccctatctctaatctctggctagcttttgctcagtttgttgcaggtcgactacgctgccgttgcaaaatgtgtgggcatctcggagagacaggcccaacgccatttttattggttgaagacgaaaatcgctagctatgggaatgctactctcacacaggctaagaagcagggtcaggggcagaatgatagccaggatggccaggatgggaacgacagctagcggctgtttctcacgtcttcgtcttgtccccctcccttagtattttcgatcattctcgccttactctcaaaggaaacagcttcgtgtgcaatcgaggatcgactagagtctgtcattgactgccacgacttagaatccacacaataaatgcacgttgttcatctttcaatttccgcattacagccctagcgtacggaaacacaagaggtcataatcctgtatgtactaagacactgttgacgacatatttaaaccgttggctagatacatgacaggaagacctccagcaaagggataacgaaacgaataatactgcctgaaatgccacactacacacccaacattaaacacagccaaggcgctcatcctattaaccgaatgagggtcctcgtgattaactatcaattaccgataaaaggaagcgggattcgagcctggtccaccctgaggctggtacgcctgatactcgcccgtgcttgcggcgggaggtggtgggctgtaggaggtatactgtggctgcgatgcaccaggtaccggcggaggctggtgcgatggaggaggttggtgggcaccgggagagctgggatacggggcttgttgctgttgttgctggaactggtgtgcgatttggggcatgctggcggcaggcgggccctgaggtgcctcatcggtggagtaggccgaaggtgagtagtcttgctgttggtgctgctggtgctggaattgctggtggccagcaggtggggcttgaccagcttgggggtacggaatgcgctcaacaggtgaatcatagacagaggtccccaattcttgggggtgatcgtatgtagattgcggacggtggctaacaggttgataggggtcgccgtggggtggctgctgcgatgcgccggcctgagactggttgcgaggatctggggagtgagaggctgggcggtacggcatctgctcgctagtagggtatggtgcgtatgcatttgccggggctggtgtggtgtctggccaagtcaagttagaactaggtgcccgtccgtatttctagattatactgaccttgaggccgaggggtgaaatatcgaggatctgcctgaggagtaggatacccagcaggcgcggcactaggataaccgtactgtggctgggcaggtcgtccatattgaggctgcgccggatgggctagcgatgcctcaaggagggactcatagtcgcgacgagccttgatgaacttttcattgagctgggtgaattcatctaaacacacgtaagccggaaatccacggtgtaacaaacgactggctgattacctttcttttgcgaatattttccaatcaattcgatgagttttggccgaatggcaagcgtagcttgatagagtgtagtaatctcttcgttctcttggacattgagatctgtattgcgggtgcttagtagagtcaggagcttctcaacactcttgatctggccaaagacgtccgcctccatttgagcctcccgctgcaactcatcgacagtggggtctgggagtttctccacatagttgagagggaaaattccggtctggcctctcagagaacccttccaccaatccttgtaaacagactccaggactgcaatggtatcgcccttgcggaattgaagctctcctggctcggacggttggaagtcgaacagcgctctcacacgcgacacggtcgctaccgatgtgcctgagagagcaggttgagtctcggcgggctccccttgggttggggcagctgatgccgatgcaacagcagcagaaggagcctcagctcgaggtgctgccgcagaagcagccgccggtgttgctttatccttaatcgagagggccaaagccatctgcaattcctcctcctccatctgacgatcgacgtcggtgatctcacgctttccaggtttcgacggtggctgcagattcgggtctgtaatataatcagtcgcgtccggagtataggacgtagaaagatacttacttgtggtttttaatttcatgtatgcctgttccatgatgccaaaatccgggttggatgagaacatctcagtccattcttccatgcgctctagaatcttagacttgacttgttgatgcgtattctagacaaataagtggttaacacttgccatttgggaaaaaaacaaaggtttcatatatgcttacacgatcgttcgccaagcggagtagcgcatcagtgaagctcctcgaagccaactcgcgatgaatcttcagcccgcagttttgcgacaacgcatttgcaagctaggaaccagtcagctatagccataaacgagagagttttcgcgctccaaggagcacagtatccggccacgaacctccaatgtatagagctggacgttggcattccggtgagccagtcttttgatcatcgcagccacggcctctttcgcactatatcgcaacaatcagcaacgggtcgctagacgagactgagattcagagctagccacgtaccctgattcctctgcaccaactttgtcacagacatcctaaaccacaaaccccgaatcagttatgtcacaaggccggaaatgctatatggcatcatgcaacccaccagaatatattcccagttctcggaggtcaaattctcgtccgtcgccttggctatacagagacaaatatcgtcagtaaaacacatcacacaggcagatccagcgtgtccccaggagcttttctccaagctagccagctccaggggtgcatggtgtatctgacgaagcagagaactggtgcaacttaccgacggcctcatcaaagtggttctgctgcgcgcgaaacatcgcgaatgtatctcctctaatcgtcgcaggcagtcaccgggtggtatgtgggttgtcggagaagtcgggcagcactcttcagcttctgacaagcggcttgccttgttttcacgtcgcggaagttcagcgacaggttccaattagacttgagtagctaagatcacgctcgcttgcgaaccgcggttgtgtagcccgtagcgatggtccagcttcgaatgcggggagtcgacgacaggaaaggatgcggctgggctgccggttgatgcaggtgtaaatatcacagagacagggttttggcagggatgggtatagcaagcgactggtattgcagcgctgggcatctgttaatcgggtccttggggatgatcagggacagtgttgggggtacctagttattgtgtacgggcggaactcgtcacctgagtcagcatatgacgatggagacctgcggaactgctaacttctaagttattattagcttggactgcctggattcttctatattgtgtctgcctggtcaagcttctaatttctccttcttttctgcttcttttctactccttttctgatcttttttctcacgctagttagaacttcgacatatcaatgtaggctgctacgtttcttcccacattggtttatcggctgtggctgaacatatctccactacggagtacctacggagtactttaggcacagactccctagaaatgacggagttcgaagctcattagctacttactttcaccataagctaacgacaacagaatgcgcaaatagaactacaagaaattacatagaggccaagatcaaatacagagacagtgagcggtaaagcagatatcacaggcaacgtgctcatggatggagtcattttcatcgacaatcgatgtgaagaataataaaggagtctgggtacataaaatggattccagcgacgtactgtagtgtaggtcgggatctagaagaaaaatcgggagtgacggggtatctgagcaagacgtcaagagatatcaagtacgacaaaattaaaccgaaacataggaaaaaaacaaatggggtcgttcatcagcatcctcttcaagcgcctcctttttgggctttctcttgagcgcggctgatacgagcagccttaaccaagggggcgagatgcgagagtggtgcgcagagagacatgaatgggtgctaaaaagcgaagtgtcagttatctctgcgagagcaatggaaaagaggaacgagtaagtaccttcagtaggtcatgcgccgacgcccgcttctccgggtcaaccttcagggcaaagtgaaggaattcgcggaataccggggatagattgtgctcatctttgatggtgggcgttccgttcgtagcaatcagatagagtgctcgcagcggggattctgtcaggtacggcggctcgccctcgatcatctcgatggccatgatgcctaaactccagatgtcgaccttacggccatactctttgcgagtgacaacttcgggggccatccagtacggggtaccgaccatggtattccgcttattctgcgagtcgttgatttgagcacagaaaccgaaatcggctggagattgttagcatgatttcgacacaacgacagggcgaaacttactcagcttgatgttaccatccattgccaatagaatgttgtcagatttgatatctcgatgaatgacacctttagaatgcaaatgctggaggccgctcagagtctagtcgaaatagtcagcatcccagtttcatcttgatacaagataaccattctgtactcacctctcggcaaacagctgcgatctgtccctcgctcataatgttgaaggtaaccacgtctgtcaaactgccaccttccatgtattccatcacaacccaaagatccagcccatgcaagaagctctctaaaaagttcacgatgttcttatgcttgctatctttcatgaccaagatttcgttaataatcaggtccttcttgggttgcaggtctagattcatctgcttgatagcaacgcagttgttgttaggatactcatacgctgtgtacacaccacctgaagcaccttggccgattttgttgaagttgtggtagatctgggtgggatcggcagggttgcagattagcatcaagcgtgcccgaatatccatggcgctgctctgtcgttgctggcgctgtctaggtctagcagcaggtggagcgcgcgcggtaggggacaccccagacgaaagatctggcgccggagcagtggttgatgcggaggcagctggaggctgctgtgcttgctggcgttgggtgcgattccgttccaaagtctgctgggccgcggccatgacttgctcctgttgccgctggtattgtgtaggggatgcgatgacattggggacgttggggacgctggccgtaggggtgccatttcgggaactggagcggctgcgatggggcgatgatggcaatggctcggattccgggatagtcggagtgccaaatgtaggagcgtggttctccggagcagttcgctgcggggatgtgtacgaatttgagatcgggggttgaggaggagggcgggagggggtcatcccggtaggcggtttcgggggagcacgatgcggcaccataccgctcagtggaggagatatgacaggcatgcctgccggaggtccgcgaggaattggcggaggcgatcgcggattctcgaaactgctttcgtgattttgcgggaatcgtggacttcctggtggcgatgtttgttctcgtgggctggtggcttgcgcagcttgagcagcttgcgcattgtcgaacttgtgccagacttcatcatcgctgtcgccacgggtgttcttctcgtagaatcgcatgatatccatcatagtctgcgggtgctcctcctgctccttcttcgagataccgttctcctgtagtagtcgctgccattctttgggcagaccggtgaattggccggtctgattgtcgtagccgacgtgggtaacgtggaccggattctctggagccgaaattttcatattgcgaccggggcttcccagcatactgtccacgaatctggagaagctggcctttttgctctgtctcgttcggggagccggaggattgccatcgtcggaatgctgcttgccggggttcgggggcctttcggtctcgcgatgagcgaaggaatccattcgttgcgtcagagtggtgaagctcgctgactggcgcagtgagtggcgtccgcggttatcggggctggtgtggttcgagcgcagtgcgggcttttgctgggagtgaggatcggtctcgacgctattctcatccaatgcactaagcatgccccgcgtttcgtgagggccgttcaattcatccgaactctgctcgttgtaggaaaaccggtgggaacttcgggtgcgagaccgggaggtcagattggagaagaagccacctgattcgtcgttggaaggcgatggaccgccactgttctgatccagagacgacgaggaggaacctgggaattgagcgttggattgcgatcgattatgctcgcgactaccgctgggagaggaacgtggataaacgggggcggagggggtacgtttcaacgatgtggcactctgatggctccgaagaatgcgcgaactgaagctagggggatccttgtggagtttgctagaagttcgacggaatttcaatgggaaattgtcctgattcatggtgggcggatttctgtctctacacgagacagattgaaattgggccgaggaggggtcagatgcagttgttttatttttctggaccaaccaagttcacggacctgaggggaatttatggtccgcggagaataaccgggtccccgaaggttcttgacgatggatggaatggaagattggaagggaagtctgaagagaggaggtttagcacgtggagtgggaaaaggagtcgggggtggctgggcggtttgacaggttgaagggtatagggagatctaacaacatctaaagtcgactctatcagaccgagtcagagacacttacagtcctcatttaggatgttataagaatagaacgaccatagagtctcagatttctacggagtaccccgtttattattccttacacttaacggcttctatacagatccactatctttaaataactaaatattaattgtacctttctggacctccccaatacaccacggagtactagctctccagcaaacagaccagaagtacctatcactccccttttgcccctggcaggtagccgaatacgtcctaaaagggttcaaccgccccgggttggacgggtcaagtgtgacagatgcaagccaatatcactcggcacattggaatccctgggcattgggcatccttagccctagaagaacaaaagcacagtcgcacagatccctcctgagcaattaattacaacagacggccattgtaaccgatttgctgagccaccggcttcgggccatttttcttccatatgcgccaccgttggttaccttcgatatctcgtttgcacctcacacgttgggcaaacactaggttgattagagtccgtttacacgggttctactatcctcctccatttccccattccatttgactcggatcggtatataccactttccatgatgtggctttagcgttccccatattagtttcagatattaccggtggtgagatcgaatgagacgtggtccgggctctaagggcctttttcaactggccaacttccatgcgaagattgaccattatctaaacatcctcttcacctcactgtcgttggtccagtcaagcggggtctgagatttggcctaaaaccggaccgtacggtattgacagaggctgatcgcatgactttcatggagctttctgcgcattctcatctcactttaataggttgactttgatatctgccctcgggaattacaaaaaaaaattagagatccacagtaacatatatggccacgcaagctagccccataggagcatatatttatagcgagcaatatcaggaaagattgttcaccattatcattctttgattcatacaaatagtatcgggaattcaggtctacaatatatcagcaaaaacatggtctatttggttaacaaaggttgtcgatccaataatctctctaaacacttccccactatcttcaccactttcaatcagctctgtatactccaatatctgcgaccgtcattcaccccctaaacggatggaaatagtgatatgaaagagttgtgtgaatgggcccgacgtactaactcctcattgcggaaatcaggtcatagtgcaaagggaaggaggcggaaacatgcctgttccgttttgaaatggtcccgacgtacagattcactacagaggcgcgcaggaacaagtccactgtcgttcatggttattctcatgtgcgtaggagaacaaacttcgaatttcggggttaagattcaccgtccggtttagagctgtaaatagtagaaccgctgggatgtaccctcttcatggggcacactagcaaacatctagtatctggcaaacgcctcctgatcatataagacatctagatcaggcgaataaagcagtcttgcagtacagcagccgtgttaaggtctgcatcggtaaatagcggtgcaggtagaaaatggtaaatcaggagtgtagctgggtagtactcaatagcatacgcttgatcggagggttttctaaatcactgatagagtagggaacaattggcgagggtaagaataccttgcctgccctagtatgtgattcaactctagaaatgtggtttgtatgtttgacgttagctgaagtgaagtctagcttttcaaggatagtagatatatcacagatatttacttgtactcaatctccttacgtggtatactatgtaaacatggttatcatagtacagtctctgtaaatctcctcggatatgactcgaaaatcagaaggctgtaaagatttctcacgtagcgaccactcgagccttcctcttgtttacttcaactattcttctcacacacttctcccctccacctttcttcacttcagtttactcttctatcaagctacagcctctgtatcacacacagtctagtttacacttcatctgtttgggctctagactcttaacgatttcagcgacacccagcgtggcgacttgtctttttgggcagtctcttgtctggcttgtcacgcatctgctgcaatacttgagttcacatttttttttcacttgcgtaagtctatttttttcactggtcttttcatctgaatcctaacttctcttcattacgtttattgaccatcgcattatccaggtactttcctttcctataaaacacagcattatggagggaattacatccgaggctgccacattcagctatttgttcttgtccggtgatgaaacatgtaaggcaacggacctcgctgcatttcttcctcggtggcttagcgaggtcaatgagaataggctgattcccccgggtatcccagagctactaactcatcttttactcccatttggaacacgtgatatcctggaacacatcgcgaagctccgaatccctgactctttgaccgatgtacagaagtggatggtaaaacttcaagtccttgtggataacaaagcacacgaaaggctgctgcagaagttggaatctatcccggatcaaatgatatcattcgaagatatctgtggacaatctaacagtaaggacattgtttgatccgaacctctggaaatgatattgacatacgaaaactcaagcagctaggacgaatgataacctcgccgttgaccctaggcgcaacctccggtttgaccatgacatacgagatgtgatgattcggggcgacaaagacgaaatgagacagtatcaagacgtcttttacgggactggctccgttgcctggacggttcgatctccttactggaatatcgccttggccactgacgatgaaggtattcgacttctcccggataatgtcttggacagagtccttcccaaatggagacaaattctcaccggggagacgatcccgaccccgaaatatggcgttatcgattcttttcgcgcgtggttggctagtgaggagaaaaaggccagtgatctcggcaaaccttggcccgaaacccccgtcattcccgtctcttcagccccgaagcccaagtttgtaagtcccaagactccggatcgatctcgccttcgcgccatgaattcgagtcgtttctctccatttgaatctagccccaatgcccccaacaatgagcaaactgaattgctccgagacatactcacggaacttaaagacttgaaaaatatgatcagccaaaatatcggaaggaagcaagagtgcgagattgcaggaaaccaaccgtatggatcttggcaacagagcttccatcccattccttccatgcctcaaggaatgcaaccaaattatctcgtgccgcaacaaagtccattcgtcggtgctcaatatctacctccccttcctcacccggagtgggaacgctggaactcccagtaccaaggcccggctaccatgcccgacccgggacctggttcagcttctcatccctaagcctgcccataaccaaggaaggggagacattcatgtacgatttgatgtggggctctttgaccccaatcactacagagagagttgaaagtgaggatgagacggtacgtagatgagcagctgttgctatgttttatgttggacattgaggactacacctcctcgctgtatcatgtcagattcacaagtatgcgtgtctgttaggttcaatcaatcgaactcaacttcagtctattgctggtcgtatgggactgatcccccccgcttttagtgaagagagttgaccatctgcacagtgacgaatccgcatgacaaccaactctttagcttctttcaatctcaaatatcagtggagctaggctgatcttacgcacagatccttctcagatgattggcttaatatcgtccgcagtcggtccacatgggtgcagatcatcccggagtaaacaaagatcaaatcacgcaagttagtgggatatgatgtatcccaaattttatttcgctgaagatatcaatgaacagaaggtgaaatggaaattgcaaaatcaacttcactaaaattcactagtgtcaagggtaggtgctctctcccttgctgatgagaatgtggaaccacgcacttgcgaataacacgtcccgttcctgccgagagacctttagcttctagaccttgagggcggaagatcatcggtgtaactcatgtgggggatatgcagaagattcaatggagtctaaacgcaacgtgtattgactgtgccttccacaatgcgagacatcacatagattcagacaaaatccagagttagttacagtaagcagatgctgtaagcatcaaggtagctcttttgcagagaccactttttattttgatgatctaccgatcagtaattagcgcatccctttgggcgccgactccagttagactggactcaataccgacatgcgccttacatcgcccagataagatgtacaggggttaacagtcggtgattggattagctgtcaatatgcgaaatgggcatacttcgggacctaacctgggggagctgcgaatggtgtagaccggatcaacataaattggacgtgattcctccttcccagggtgatttttattcacagcccgattcccccttctgtctatacatcatgtttggtctcattccgctgctatttactgcactcgccagcgcataccctaacaggggcccttgcacaggcgattgttgggctcatgacccagccatgatccagcgtgtgtcggatgggaaatactaccgcttttcgacgggcaccggtgtcagcattcatagctcgccgtccgtgaagggtccatggacggaccttggctcggcgttgccagatgggtctaagattaccctcgatggtgtggacagcaagaatatctgggtaagaatgacctgaaaacgcaactgggaacaatatcaaggccaatggctaacatgattcaccttataggcccctgatgtccactaccagaacgaccagtactacatgtactatgtcctgtcacagatcggcacccagaattcacagatcggtgtcgcaacatccaagaccatggatccagggagctggacagaccatggctccgttggtctccctgcaaacgacaactacaaccgtatcgatcccgcctggatcagcatcggcggcaagaactatatgaactttggttccttctggggcgatatcttccaggtccagatggacactcctctgcaagttggcggcgcaactccctatcaaatctcgtggaacgctactctcaaccaccgcgaggagggttcatacgagttcaagcacggcgactactactacctgctctactctgctggtattgcgggcaagtacacaaagacattcccagctgagggtgccgagtaccacattcgtgtttgccgatccaagaccggtcttggtgactttgtatgtttcccgtctttgttcattcgtcaagacacgttctaacatttgagttacaggttgatgcagatggaaagtcctgcaaggagaccggaggcaccatgctcctcgcaagccacggccaggtatttggacccggcggccctggtgttgtcaatgacaaggacctcggtgtggtcatgtactaccactactacccccttgccaccaagcagagcaccgatgtctccgacaacgcgaactataggtacgcctggaacgttctcggctggaaggacggatggcctttcgtcaaggccacttaatgcacatacttttcgtggggagcccgcggggctgatacatatctttttacattcttctcttgtcgatgattgggctcatatacttttggggggtattgacttgtttattcgatacccataccttcttgatatctgtcatgatgcacttcctctgtgtctggcaactcttaattatataatattggtcctattcttattcatatgggtcaatttcggcattgcccgacccacatgaagcattctacaaggacataatttacctatgcgctgagacaagtctataaattctcgctacatttggatctactctaaactactagcctaagcgactaacttggaaaacctgtttgaagacctgcatgcttagccccggtgcttccaccccattttctacaagaaagtgaacacaaacttgttcgattttggttcaagctttccttccttgagcggttgaatcaacatgtctattgcagcccttcctgtagacgcaatggtcgcaatctgtgatcatctagaactgtcatattattttgcactaagacttacctgccgagcaacatacaataacacaatagagatatctgcaaggcggtgctacaccagtatctctttgcttctcacgagtgacagtctctgtcggctagaagagatcgctgctgatgatattcttcgaacattcgttcagaaaatttggattgtgccagccctattcgaaggcaaggagaaaatgacagattcccgcttcgcgcattccaagtttgggaatggggcacggaagggttggaaggggaatgcggctgagctccaggctcgctatatcgcatttcaggctatagaagaggaccaccgcgccatatcaaagtcctctgccctcagagataccctagatagatgcctgccacgatttgaaaatgcggtcgtctttggtctgcagtctgatccgatggaacgtctcctcaatctagaaaaaggaagctatattcgttgcctcggcctacctgaattgaggaatcaactgagttgcactggtagaccgtcaacgtggttcgatggatgttacctaccagtaatgggcaatgcgcatgcctttgctttttccgctcttgtggaaacaattatcaactccaaccgagaagttctcgcactacacacatgtcgcggatattactgtgggatgacaatgcgaaaccttcaactgacggagtcacaatacaaacgcttgctacccctcctacgggaattagaatgccttcatatgtgtctccgtctcccgaggaaacaagaggatctcgataaaagtggcttctgtttccttcttgatatccttgttgctgtagcaccaacgcttaagacgctggtgttttttcaatggcacccaaaatatgaactgaacccacgatactttgaagaattatcccggggtctccacttctcgcagctccaggatcttagccttcagtcgattgaagtcacagtcaatactctcaaggcgtttctacagagcgcggctgcgactttacggcgaatgactctgaagtcagtagggttaagagatccaatcacctcagcgccagatctaggacctatggaccgagaaagtcgaattcgagacagaaatctccgcttgttataatgccgagacggcgactgtttcatttgatacctggatccaacagcgtcgactagagatgtcgacatggtgcccattcgatttaccggggacgaattatggtaagtcatccagctatgactagaagcttctgttaacctttgacaagaaccgagagttgggtcagatggattggctgagaaaccagttggcttcgcatgtttccctagacgcgacaaatctcgaaaataagtctaaaattattatatatgacatgtagttcaatgccgttgaatatcacgatccccatataaatgtagccacagtgacgtgcatcatcaattggccacttgccgccacgtgcgaaatccaatcctgggatataaaatctaaatctaaagttacgaagtgattgattcacctgggcatttgagattgcttatacaatgcttgattggatttcggatggcgttataacacgtatccgaatgagagcgaagaacagctaagctattattgttgtatctcaaattcacctgcgcaaatccaagatcaataactattcattatcaattcctaaagaaaagagcccaaggcgtgaaaaggtgcaaaagtgtaggcgcgggctcggagaaaacatccccggagattcgagctggccttttcctgtactttctggattgtccggggttctcgacctttctctcacctctcacctccacctccacctctcacctcctcttcttctctcacctctcttcctcttttctttcaggtggctcctctcttgagcccctgtatctttcttttttgattctccgcgcttcgtcggtccaaattgctattgcattttcctgaattgcatccgcatctcctgaaaagaaaccctatatatcctactcaattacgaaagaaaaggatatacttttgcctgtaagttattcccaagtccttgtcatgccattgattgcacccggggtttacggtgatctgtcctgatctgtcttgatccatcgttattgcatactgacccggcccgtcttgattgcagcatttcgtgcatagcccatttatcaaccttgtctccaaccccgatttactccgtcaacccccattactcctaatggctcttgaaacacctactactgccaacggcggatccctcgctgccatgttggaacagcagcacgcccgcgacgagttgcacaagcccactgtggaggaaattgtggacgaggaggacctcaaacaccaccctccgacctcactggagcccctcctcgtcgatgccgacacacctgagcctacccccctcgccaaaaccgcttccccggtgcctgcccccaagcccgctaccaaaaaggccccgacattcgatgttcaatccgaagaattgttcccggctttgggcagcggtccgaagcctgctgcccccgccgccgctacatggggtgcgaagaaaccttctgcggcctctgctgtcgcaaatggcttgcccgcgaagtcaatgggtacgtggattattttggaccttccggattggactttttttgacaaatgaacagagatcccccgtgtcatggcccttcccggaaagcacatggagcaactccgcctagcaccctcccagatgcaaccccgtggccagatgaagaagcctcttcgtgatatcctccgggatatctcccgcaggtcaaaggccaatgttgatatgcgtggtggccctggtggctccatcattttcgaaggaaagggctccgtagatgcggtgcgccaggctctccgcgaggtggcccagcaggttggatctaaggtatgtgtcttagacgtgccggaaacgagtgtctaggctgaccaattcgtcctaacagcaatccgtccgtgttcccattcccacatctgcacgcgctcacatcattggccgtcaaggtaccgttgtgcaggatatccagactcgcaccggtgcccgtgttcaggtcccccgtgccgaccccaacgctgccggtgccgacgacgatgatgatgataccattgatattttgattgagggagatgccgtggccgcggagatggcccgccgcgagatcgaggcgattgtcaaggagcgcggctccaacatgagcttccgattgaagactgtccctcctgaattcttccccttcattgcaggtgcacatgacgccaacgtgcgggccattgaagaacgcacaaaagcgcagatcaacgttccgcgctatgatacctggtcaagtcagccccctcctcaggaagccaaccctggccaggttcagtttgtgcctgtgcctgataagcacattttgatttccggagaacgggctgccgcacaggaggctcgtgctgagattgagcgcttggctgctcaattgcatcagcagcttacactgcgccagctggctatcaatcgtggccagcaccagttcattctgggtaatgaggccgacgctctgcatgacttcgttgcacagactggatgtgccattgtactcccaccttcttccgatgagagtgagttcctcaccatcaccggtcccctcgaccaaatcgaggctggtattgaacacgctatggatcttgcgacaagcatgcagatggctagcattgatctgtcccgccagcatcccaatgctcccgccggtcccaatgcccacgcgagcgctctctcgcagtacctccgtcgccgccaggtcgttaaggaactcgaatcgacctacgatgcgcacattgcacttcctcccagcgttggtggacccgtcacttgggaggtgtactcccgtgacggcaagaataccattcgtgcccgttctgatatcatgaacctagtccaggctctccccccctctaaactccgccacgtccctgttgacccatacttccaccagtacctgcgcgacaagagcgcaagtgcccttcagggtgactttggtgtccaccttatggtgccggatgacatcaactgccccgaggttgttcttgtttatgaaggcccctccgcaactgcctcgcgctttgaagtccccagacagcgcccctcgcccgcagatgttgcagccttcgagaagggtctgcaggaggcccaggaattcctcctgagtgccctcggagaccagaatgacattgttgccaagacggtctccgttcctggcaaataccaggagaaggcgcgtaaattcatcacccgcgagcaggaggccaagggcgaggacagcatccctgtgcgtgccattgttggcgacgtcaagggttctcaatgcgagatttcgcttcgtggtccctcggcccgtgtgactgaacttgtcgccaagctggaggctttcgtcgtcgagcaggagaaggacgatctcgagcgtggttacaccactaccttcgacttcccccagaagtacgccaacttcctgattggcaagcgtggtgaaaacatcaacaagctccgcgaggagttcgatgttgatatcaaggtggagaacgggaaggtcgaggtcaagggacccaaggccaaggcggatgctacccgcatgcgcatcatcaacatgggcaagaagttggaagatgagactactcacattctcaaggtccccgcccaataccaccgtgagttgatcggccagcgtggaaaccaggtcaaccgtcttcaggatcgttactctgtccgcgtccagttccctcgcgcaactgttgccaatgacgatttgacggagactggcagcgatgctggtgctcgtccccagcgtgctcagcaggctcccgatgaggtcctcgtcaagggccccagcaagggtgctgacttggctcgtgatgagattcttagcttgctgcagtatgtcattgagcacggtcattctgccaccatctctgtggcccagagtcaggtcgcatccttgatcggccagcgcggccgtgagatggacaagcttcgcgctgataccggtgcccagattgatgttcccaacgccaacgatgcgccggatgcgtcgggccgcgtggagattcgtgtcaagggtaccaagcagcaagttgctgaagccaagaagatcttgcagcagcgggccagcgagttcgatgcgactgtggttaagaccattgaggttgacaagaagtaccacaaggctttgattggtggaggcggtatgttttcatgcaaagtgatacgtctattttcaattactgacttaacataggtgccaacatccgcaagattgtcaccgaggctggtggccctactgacggcaacgccgccagaatggtccgtttcccccgtcccgagagcaccgaatcgaccatccgccttgagggcaacggcaagatcgtggataacatcatcgccgcgatcgaagagttcgtcaaggaacgccaggaccaggtcacggagatcatcgacatccccaccgcccagcaccgcatgctcatcggccgtggcggcgagacccgccgtggcattgagtccaagtttaatgtcacccttgatatccccaagcagggctctggccgtaccgatgtgaaactcaagggccccagcagcgccgtcgaaagcgccaaggagcacgtcaagtccatgctgaaggagcagcacgcggagaccatcgaggtccccagccacttgcaccacgtcctcgccgacaatggccacatcttccgtcgtctgcgcaacgactaccaggtcaccgtcgaccacgccggtcaacctgttcccgtacctgccccctccgccgccgaggacactcgcaccacagctgaaggcaccgacatgcccctgatcattgatgaccccaacacaaccaccgatgcacactcctggaccgttgtggacaacaacacatcagaagtcgcctccacccccttcccttgggttctcagcggcaccccggagaacgtggccaaggcccgcgccgtcatcgagaaggctcttgcctccgcatccgagcagtccattacaggctacctgatcctgccggaccccaagacctaccgctttgtcgttggtcagggcggcagccagatcaacgccatccgcaagaagacaggatgccgtatcaatgtgcccaaggaccaggctcgcggtgaagcgattgagatccggggtagctccagcggcctggaagaggccaaggagatgattctagaggccgtgcagaatggccttcaaggcgctgcgcggtgagtggttctggcttgttattgcgacagtggttttcgatctgacatataaaaccgactcttacaccacccctctctgctttgaattcgagcgagcgggaacaatatcattttagttgtattcttttggcttcttcaattcttgttttcatctttttttggtatctatttcatgaatattggttttttaaaaaggattctctctggtcttgctttcgcatttattgcttttggcctttctcatcctactgtgccttcttttcttgtagctacttccccagatctattcggattgttctacgagttgatagacctgtcgattctttgtgaaagtgacgagagcgttgactgcccaggtggctttccaatctaaatgatttcactctatcatgaatgaattggagatctgtatacctaatttagcttaggacatgctatggtatagatccgaatgcagattgcttactagaagaggaacccgatcgaacgctgtcgaacagcctcggacctaatatcctctcgtctccgtattagaaatcaccttcggaggaactaatgttggagatgcattagagatgaggggacgtcaggatcgtcgctccaaaaggagttaaggactccgggcggatctgccatgtcatcgtgatttgttggttgtacatatcccagcgaggtaactatatgttgacattcatttccataacaattcggttccgaaaactaaagattaatccaataaagtatgtcgatacatatgaatagataaaaaaggtaatataaaataaaaaaaagagttggggtactcataaggccccaactcgaaaaaaaaacgctctctttgctcttttagccatagcgactcggactcccatccgtatggaagacgggtatttaaatctcagattcttcattctgaccacacacaaccccactcgctagtcccacagtcaatcatctaattgcataacgaacgccccggccagtctactgctgagcctgttgagcctgctgggcctggaggtagttgtatgcgccgtatgcgatagcaccaccgacgaggaagacggcgtagaggccgacgccgaagccggaggcggaggaggaagacgaggagtctgtgctgctgctgggcttggccttgggcgaggggtcaccgggctattttttcgacggtgttagtattgcgtgtgacttttgtgtagatggggaaatatggggtgtggggggaaggatgtatgtaagaaggggtgcgtaccaggcgcttcacgttgccgacaaacatgccgtcgtcgaggagtgcgcgcgcctcatcactgtggccgacgtcgtcgaaggcttcggtgcagtcttggccggcgagatcgaggaggacttcctcaccgccactgttggattggttagcctggtggttctggggtttgatgtgggtcggtgaagcaatgcgagacgagtgaagacaataggttgaggtggccttttttttttttcgctcttctcttctactctcgctagcgcttgttctttggcttcgggtattgggattctagattcggcagtgatagatatggagacaacgtacgggtgttcattggcgaatgtggtgcaatcgtagaccttgtcgttgatgatcaggtagaggtccttcttggtgctgtgctcggcgacctcctgcaaggtgagttccttggcttcagacatgatgaattgaggtatctggaatgatattcccgttgtcagtcggggttctgtataaaaaccgggcaagtgaagaggggaatgtgttgagtggagttggcgataggagaaaaccccgagaaatgttggggcggagataggaaaccacttacggggtatggggaagtgataagtccaaaaagcagccagagtaccgagaaggagaagagaagaggagagaagaggagggagaggaattgacgaccaagacagaatcagcgagaaaaagaacaacagatgtcgctggtacgtgcggctgggcggtctcgttcgtgtggggcccaggcactggactttggggatgccgtgaattacagccggcttataagaggagtcaggcaaaaggggcgtttatcattggatggcttcgatgagtttctattactctctatctttgtcgccggtcccgatagttagttctgaattgagtctacactctatgtatattgcgctagataggatctggggtctgacgaatcaggggctgcttattagagtacatgaagaggagatctggccttgggctgtgtatagttagttagttagtatcaaattgtactgtagcatagcatagttaactggtacaagtacattaatcgtatgtacagtaacatgtatgaactcaccataacctcggggatcgattctcgggtagcaccgacgggagagcgttccgctgggcggaattaagtactagcacacttgctgttgtataaatatcataatactatgtgcataataatatacctctatccaatcgtcatcatgacatgctagaaatcaaaacgctcatttcgctgggactcgctcataaaacacaatgtacgcctgctcgttctgtaatcggtcccgcgtccgaagctcgcgcggattgaagttcgtggctcggtcgtcatcgaatttccgccagcattgccgctccgcatcacggaccagcgagatgtagtgtccgctgcccatcgaagacccgagatgccgtagcaccgcaaacgcatcgtaattgaacggtggaaccgtggccccggtggcgggcggcatgccgggctccggagggggaagatgagggtgagcaatcacaaaatcgtccatgcggagaccgtaaagcgggaaatcgatgggggtgtggatcttccgtgcgctttgggtcttggatgcagaaaagcgcttgaagtggacaacgagaatctggggcgctcgcgtgatgatgatctgcttggtcgccattcgcttgcatttacaaaatggacacttccagacctcgtcgccactcagcatctcctcctggcagtagctacggaggcactgatagatatcacctgcacctgtcggtgggatttccacactgatactgtagaatgcttcatatgtagtggatgtttgctggcaggtcgtgcagcgtagtcgactggcatgttgtccggcaaacagtgacgagataaaagactcctctcggtggcagtatcggtcccattcaattcgggaaaccttggtcattggcattcgctctcgttgcatctcctccgaaaatgtcaaaggtcgaagcggtgttcgctgccagttgatattgagatcctcgtggaggcaatcgaccacaaaatcgaagaattctttggcatcttgctgccgctcaatggcccattctcgattcaagcgtccacagaagttccggaacgaggtcggcatgatgacctcgacatcgttcttccacagtgaccggatcaggttcgcataaagtccaggcataacgccctgagatcccttccaatttttttgtacataataccgaaatcggttgtcgatgaagaacctactcagtggaatcgtggcacttagacattgaagggtggaattcatgtaacacgtcacaccgaaattggtcaatccagtctgcggaagcttgaggcgatctaggcgggagcttggagtgtacagggctgttcgattcgccgagttctgtcgttgcaaatggggttggatctgccgcccatcggagacaccgctatagctgggacggggcacagcagggggtggtcgagagggagccactgacatgtgtgcagcataattcggagtagcactaaggggagggcgggaatccgcgtgtgtcatggactgttgaatatcgtgcggttcgggaaaacgacgtaggaaagcctcatatgtgttgacgaatggggttgaaggttctgatccagtctcctcgggttcttccgtcagcgattcttcctcggcataggtgctcgtgtcgatctcctcgactttagatttctccatccactcagataattccttcgaattcaaaggagtgaactcgcgcagtcgtctcttccgaatttcgagacttgagttggcactagccatggtaggcactctcccgaggggccgaccaggtctagatacgggctttctggcctgcagagaactcatggccgcagcagttgaggacgtcgcaagagattgttgtcctaaaagatcgatccaggcatccaatccaccaactaggagagccggaggccgtcccgccttcagaggcttatatgcattgaactcatagagagtatcgtagagagccctcaaatggggtgctgaagtccccaccggtgagccagcgagatagctgacggaatcggcgctttggtcatagtaaaccacaaggtcgtactcgttccgtttctcaaataatgcctgttcatgctccggtgaaacaacgagacgctcctctagttcttccgctgacacattctccttcagaaccacaggttctatgcaaataatagattttgcatatacatgaccattatcgtactggtctcgaggccgaacatcgattagcagaacattaaatttccgcagattatcaaggagactctgtgcagttatagttgtgctgtacggcaaatcaggtgagttgctccgagtttctcgcgccgagtccaacccattgggcgtcagggacctatacggattgtcgtcaaaccctccccgcgttggactgacccgtggtgagttgctgaattgcgagtatcttggattggttgagtgtgtgctctctgttgaccttctcggtgggttggatgtgggttttgatggcacggtgaagacagggctgtaagccgggtcgggagcacgtggtaacgatgtgttaagaggaagcttcggtggaatggttggtaaattagatgaagagcccatgacccgaggtcccaatggccgtcttggcggtggagagttgtagttcgatgaataaagtggagtttgcccagcagatcctacaattgggcttcccagccgagtagtacttgctcccaacccatgctggttggaaggaggagacgccttgagtttggcaaaacgttgcgcaagtgtgtcatctgcaggactggaaaacctctgcaaatttacctccgtctcgggcactctttgatactgagttggacttggcattctagcgaagtttgttccagactcttgattctcacggccccgtggcgtgacagaaatttgttttggggatctggatgtatatataccggttggctgcatgccactgaccaaattatcctcgatgatttcccgcttgatcgcatccatagtgccttgtttggaccgcaccgccttcactagatcggcgaactccttgtaccaatcagggcgttggctgacggtgcgatagtctggatgatggggaatgagattgatagtgatttcagaggcacgaaggtactgaacgtaggctttatcgttgtattcgtcgtctgagaggttcttggcctttgcgattgcatcggcagccgttggcaagaggatatcaagctatgatcccggttagaggaaataattcacacaattgtcagaagtgcgcatataccggtgtagtctcgttaacattcaacgcagcagcttggtcttgtaggtctttgatattggggaaccgaggtcgccgtggtgggacgagaggggccttgcccttgggatacgaatctggtcgggtgactcgtccgttgggatccatgtcgttccccatgtcgttccccaccgagtaaggacgccggttgtccttccacggtggtatttttgggggagatggcaaagtcgccgcatcggaggacatggtagatccaggcagcgacaagcggacttagcgcatggttatgtccaagattaggaaaacaaagagagtaaagccaaaagacaggcgtacccaatccgccgaataattgatcaagtccaaataacaaacacaaataacgaaagacagaccagagtaaagaggacagatccagggacaatgcgggatgcctctggggtaatcagatgacagtacttcaccgccctcagcctatgacgccaggggcttagtcactactgaggtgcctggaagctcctcctccaacttgccagtctgatcttcatatttgctagattaagtgtcttggctatctgcaacgctactgtgatctgagtcccctccaaattagacgtgcatcgggtgtttcgccttcgccatggcaggctggttctcttcaacctcgccgctcgatgagcaaatcgagcgggcgacagcttcctccttgtgagttttgattgccgcgttgttatcatacctatatgaaccggggctacctaccaggatgctctgaaatgaatgatcgcgtggctaactcactctcagggaagacattgccctcaacctggagatatcagatatgattcgatcaaagagcgttcagcccaaggatggaatgaggtctttgaaacgacgactcgagaataagaatcccaacatccagctggcgacactgaaggtgaaacatttattcccgtgagactaggcttggaacaagcgctgataagcccgcccctctagttaacggatacttgtgtcaaaaacggaggaacacatttcctggccgagatcgcgtctcgagaattcatggataaccttgtctcattgcttaaatccgaaggcgctcctcttaatgccgaggtgcagggcaagatattggaacttatccagaattgggctatggctgcacaaggccgtatggatttgatgtatttgggagagacatatcgcaaattggagagtgaaggataccggtttccaccaaagaccgaaatgagcggcagtatgctggaaagcagcgcagtgagtgtgcctcaaacccttccgttgcagaagctaatttgtgaatctgtctcagcctccagagtggatcgactctgaagtctgtatgcgatgtcggactgccttcagttttatgaatcgcaaacaccactgccgtaactgcggcaacgtgttcgacgctcagtgttcaagcaagaccattcctttaccgcatcttggaattctgcagcccgtcagagtagacgatggatgctatgccaaattgacctccaagtcatttgcgccaccgggaatttcggatcggtccgcgttcaaaaacaactccatcagcaaatctaacacgatggaacctcgtgctggtaaaccggacacagggttcgatgaggatttgcgtcgagcgttgcaaatgagtctcgatgaagccgagggcagaggtccttccgggtttgtaccgcagacaggcaacgctccagaaccggccaaggctgttccaaagccggagaatgtggacgaggaagatccggatctcaaggctgcgattgaagcatccctgcgtgatatggaacaacacaagcaaaaccatgcggccgcattgaagaacgtgcccacttcaaattccaccttgcgcgattcctcgagcacgcccactcaattgcctaaaaatccgtacgaactaacccctgttgaaaccgagaatattcatctcttctctacactggttgatcggctccagcatcagccgccgggcacaattcttagagagccgcagatccaggagctatacgagagtatcggtgcgcttcgaccaaagctggcacgaagctatggagagaccatgagtaaacatggtgagttcagctgtctttatttatagaactgcaagctaatcctcacagatacattattggacctccatgccaagctctctacggttatacgctactacgatcggatgctagaagagcgtctgaccagagcctattcccaacacaatcttggtcatggagctgttcctgggggcgcgcagtatccaaatcttcagccagccttctctaatcacgctcccgacgtccagagtggagccgagaatttctattatggaactcaaatggacagctctcgcccacctactactatgtatgctccgcagcaggtgaacggcgatgggttccaagttccatccacctacccatcacaagctcaacatggtgccccgacaaatgagtcttatggtcagaattggggtggaaatacctacccggcccttggatcacctccacctagcaatggcattccaaataactatgccaatgccccaacgcccagtgccccggctcaatattacgcagcaccacacgaccaagacacagccaggtcacccggcgcagaatccccataccagccgtcgcccattatgcgccgggactcctctcagtatcaggccggtgcaactcccagcggtccaacccccgctcccgaacaacacgcatctgccgggtatgtgcaatcgccgggctattctgtgccacccactgcgccagcacttcatcagcaggcaacgggcccttctcagtcttactattacccgtcacaaccccagcctcaacaacctcctaatgctgtgtcatctgcataccctccgattaacgctggacaaccggggtcgtatggacaggaaacttcgcaaccgccttatcagcaaccagcacggcccgtggaggaaaacctgattgagctatagcgtcattatacttcgttcggcgttatctatgttttcatattttgcgtttttttttcgcctcatgatacctgaagacttttagcagattgaatgtgtagcttgaagtgggtgaatgaagggatctcaagtatacacgaaaagacactgcctattgccagtggctaatgctgccaatagttatttccaatatcctctagagctctctacattcttaagagtgcattttaaattatttatgtagctgggagacgacctggattgttccatttatagaagagcctcgccgctgccttaggcattccacaatattgttaccgctctttaatcgccgaagacagcgacctcgctctccctcttcttcactactctaatttgccccggatttctctcctgctcttattcttttcgcattccatttgatttttcgttcattattagcggttcgaaccggtgtaacccggctttcagcttttgagtcttgattgctttttgcctgcatgccctctaatctgccgtgagacctcttgaacgacttgcctcggccaatcgccacactctatgctctgtgaccaccgctgattacccgcctgtggctcctctggggtctttttgcttaccgccatgcctacctctaacgcttcaaatacctcttcccctgttaagcgccccggcctcggtcgccgtgcagtgtcctcccatgcagttgtcacgcgcagcgccaatcctaatgacctgtcggtgtctcacacgcagaaagcacccctacatcataaacctcaccgcacccatgttgttggagctcaccgtaaccaccaccgcaacccctctaccggcaaaaacttcaacaaactccaacgtctccaagtagcagctcccgagactggtgggcggcaccatcagcgcaagaagtcagcccccgcaaccccgatcgcgagtccaaaggaaagcgggcacgttcgctgggatccggttgtaaatgaccatacaaccgatccttccatgaagcgaaacttttccactcctgtgttgcgacggaatccatcagccgttgggaagaaagcgttggtgactgagcgaccgccctccagcgcgttaaagaaaaagtcggtcggctttgagctgggggatgacgagactgacgacgctgagtgggaagataccacacagtcacccgaaagtacgaggcgcaactcggtggcaccatccaatcccagcgcagacaatagtaccgttcttgtcgaccaccttaccttcgtcaagcgaccatacccccaaatgcctcgagcgaccagtctgcccgagtcgatcaccaccaagtttgtccgagagcgtactgaactgcatgaggatgaggttgcggatgaggaagccgagcagcacgatgaggaagaagaagccgaggagtccagtcagcacacggagcagggcgacatagcagcccggctgctaagtcctacgcactcatccaaagcgccccctgccatgtcttctatctcggctatggtgaagccggaagccaatagtctcaataccccgtcgcgtagtagcgcatctctcaacctggctgctggccaggacaacgctcggcgcacattgtcgtcaaccagcatggccagcatgccgggctctcaaccccaagctacctcatcctctatggaaggtggagtctccaggttcattttggacaacaagaatagcgttgaggaatcttctcgcaacgattcggacccgaatactccctcgtcgttcctcccacactaccaccccgacacaccgccctctccaactagtgcagcggccaagatgatcgcgtctcctgcgcggccgcgtggtgctgacctgccttctcgcacgcaacagaagctctggctgcaacgtaccgctaccctgaataactcacctcctgataaccatggagtgaccgcagcagttccgccgtctaccattgacccgacatttatcgccgctaaccacagcacgtatgacgccgccagggggctcaacggtgacggccgagctggcggtgcaggacatgacagcgaaacccgtcatatccgcaaggcgtatgagaagacatccctagaactaatggtcgtgcgacgtttccagtctcccaccggtcagagcttcgctcgtcttcgtcatatcgtccgagccaagaaagcggagcaaggatcagctcttatcaaagcagtccaatcagcaccttcgctgtcccttttgcagcaaagcaagcagcccactcgtcttagcaccagccctacatctaaatcccagccgcgtaatccaacccgcactgcatctgaagatccagcgacaaataacgaacatcccaataccacaaatgctaccaaggccaacgacccatcccaccgcatcttctccacttcaaccgaagcttcacgtggcccgaatggtgacaacgacgaaggatttgagcttaacgacagcgccatgttgatccgccggatgtgggagagccgagaggtcgccatccacggctaatttatgatttgtttcaccccttttatgtttatgacggttcactctatggttgttcggcgctcgcattctgtttttttttttatcacagcgatcaggttgaacataatttatccttgttctttttgctttcctgccctgcacctctattatgttgatatgagtagccaatgccacgaatttccatggtaatcacaacccacacagcccactaagcccactaatgtcccttgtcgatccaaaacaaatcggccgcctgggagtggcctggtcggctgttgtccttgcaccggctgctctgacttccggggaagggctgcatggcctgacctgctgattaatcgccaatcccgctctcctgatttgccctacaaaaccctaactagatggcctcatactccagacttcttcagacttctgtttcgtttggaatatactaggaaagccatcatggatctcgtcccgctggtaacaggtcaagtcctgcgcgccgcatactataccgccggacttgttctggtgtcaatcgtcctcaatgtgatcaaccagctcgtcttctacaacagaaaagagccacctgttgtctttcactggattccttttattggaagtacagtggcctatggcatggatccgtaccagttcttcttcgcttctcgtgccaaggtgtgtagatcttgcacctcttgatgcttccgtaatgaaaggtgacgcctactaatgaacggacttagtacggcgatatcttcactttcattctgctaggcaagaagacaaccgtatatctcggtgtcgagggcaatgagttcatcctcaatggaaagttgaaggatgtcaacgccgaagaagtctacggcaagcttacaacgcccgtcttcggatctgatgttgtctacgattgtcctaattctaaacttatggagcaaaagaaggtatatccccttctgccacttattacaaatctcatatccagagctaatccaatcctaaacagttcatcaaatacggcttaagccaagaagccctagaatcctatgtccccctaatcgccgacgaaacaaatgcctacataaaatcatcccccaacttcaaaggccaatccggtactattgacctcgccgctgccatggccgagataaccgtcttcacagcagctcgcaccctccaaggcgaagaagtccgcgccaaaatgacctccgagttcgccgagctcttccacgaccttgacctcggcttctccccgataaacttcatgctcccctgggcccctctcccccacaaccgcaagcgagataaagcacacggacgtatgcgcgagatctacctcgagatcatccaagcgcgacgcgaagccggcgaacaagacaacctcaccggcagggataaagccaaaggcacagacatgatctcgaacctgatgcgctgcgtgtaccgcgacgggacaccaatcccagacaaggagatcgctcatatgatgatcacgctgctgatggcgggccagcactcctcgtccgcaatcagctgctggatccttctgcgactcgcctcacagcccgagatgacagagaagttgtacgcggaacagatccagaacttgggcgctgatctcccgccgctgcagtacaaggatatggataagcttcccctgcaccacaacgtcatcaaagagacgctgcgtatccactcgtctattcatacgcttatgcgcaaagtgaagaatcccatgccggtgcctgggactgactttgttgttccgccgtcgcatgtactgctgtcttcgcctggtgttacggcacgggatgcgcggcatttccgtgatcccttgcggtggaatccgcatcgctgggagactcgggttgaggttgaggattcttcggataccgtggattatgggtatggcgctgtctctaagggaacgcgcagtccgtacttgcccttcggcgctggaagacatcgttgtattggtgagaagtttgcgtatcttaatttggaggttatagtcgccacgcttgtgagggagttcaagtttttcaatcctgaagggatggagggggtgccggatacggattattcggtaagtcttttggtttcttttggcttgggttgatggggacatgggctgacttctttctagtctctcttttcacgtcctatgcagccggcgactgtgcgatgggaagtccgctcgtagggcttgggaacactattagtcttagtcttagtctcggcgagtcaacttttgtttatgaaaaatgtttgtatctttaaagagaggagaggtcataagttcagaagtaatttatcaataataggcagtatatccatctattccggtcttttgtaagtgaccagtacttcaatcgaacgccatatttacccagacagcttctaaattgataaacaagaccgaacatggtggataggtgaaaggggggggggaggggtatgagtagatggtatgagatttcaatgaaagaactaatggtattgtagttcaaaagcaatcatatctcggtggaaattgaatggaagctgaaaacgtacatgaagaaaagccattgagagaatgaatgccttcttctcatgttgttatgcgtcgttcttgcccctaccgcgttgattgccgcctccacggcgaccattggcattcccagaaacatctccagcacgatttttattcggtgctctttgagactgagctggggcctgaccactctgattcgtcttggggtttgtatgcccagagcctggagccgatacgcgcctgtgatcttgaggagcaggtccatcaccggtgtttttgttggctcgacgcttacgcgggccactggcagcgctagatgtcttgccgcctcgtccaccctttccagggcgaggttcatttggctccgggtctaccaatccttgcacacgcttactttcttggtcccaccactgctggaactcctgctcggcttggatctcttgcattttgtgcttggcggtggctgcttcccgaatcgcttccttttctgtttgttgctggagcaaaatggccgacagagagtacgagccagagggtgaagagcgtgatcctgttaggtcagggcgtgggatgtgacgaattgactggatgactggctgtggtgatgatggttgattgttgggaggtactgtagaaggtcccgatacggaaggtttcgaatgagaatagggctgtgggttccctgacacactacggcgttgtgtttgcacgggtgtagccactgtctttgactttgacggcggcgtgccagccacagtctgccgcatagtcatggacctttgaggtgatgatttaacagcctgagatgctggggcgctttgacctgggagagggtcgagtttagggagcgacgctggagaagaagctgctggcttttgccaggggttctgtggtgcctccttcgccttctgctgggcagccagctgatcttgtatctgttgttgctgaagcttctttcgctccttctgagagatcttaggcacgaagttaccgctgctttcgcgtcgatctgccatgcctagcgtgagattggatacccgagactgtaatgcttctcccatgatgtctttgatatccttcttggaactagaaatcattggcgaggtccatggcgcagaagagggattagatgacgatgctagggcttctttttggttttttgtcatcgccctggactcagatggggactgtagtagcggatcttgtggggaagacatctgatccttcaagaaaccatactcaccgaaggactcggcctctgggacgcttgcccccaaagctggggagtcagggtatgattgattttcaggtatgccttctgtgaacctgagttcacgcatgacacccttgcctttcgaagcacttggtgatatgagggcctcgtcgtccatttgaaacatgagatcaccaaccgacggtctcgacttcagcattgggctattaccaacatttggtgactcccgggatacactgttcttcgccttgcgtgcagacggagatgaggtacccttctcgttatgcattgaccgggttcgcgcatcgtcatacggctcgaaacgaccaaggcgggactgcaaagtcatggcatcgatccttcgttgcttatctgcttccacggagctgacaagttcggggtatttctcgaagacatactcctcagaattgcgcccacgggatatgggccagcacgccaactgattttcgtgacagatcagatccaactcccaaagcagagtaggatccagatcttcgagatatctgttagcgagcatggcctcgagatttagacagatatattccagggcagcatccttgaactctgtgacacagcaaggggcaattgaattgagcaaatagcacacgtttcgcgttgtgacgaaacgaccgagcatcttctgacatacttgagatagtcggtcgatcatcagctcatttgccacgaacatgacatccagaagcaagtcaatgaaatcatcaacatctccaatccgtacttcatcaaacagtcggtcttccgtatcggcatataggtaacgcaggacgaattcaaatgtcgagcgatcaatgtgctttaggtcgacatgcacgctctggtttgggtccgccttgcgcgagtctagccaccttccacccgcatgaccatggaagagtgtgtcaaagaacggacatctctggcacacgacttgactgtgcactttgattgtatcgcctttgagctgaagagtcacgtctgcgctgtcaaataagaacgagtgattgatggcatgggccatgtcgattttcaggctcctttgcggctcgaccattagtcgtgctgcccgctccagcgctggcaggcctagttgcatagaaacccgcataacttcagtgcgaacctgccggaaacgggccgagtttgcgggcgagctccttgccaggcgccagacatcgagaataccgtctgtgtaaaggaaaaagaccacgttcataacggtcaaaaaatcaacaccttgaaggcagatctgcggatgtccgtccttcccgtattcaataccaaaaacgtcggggacggatgaataatatgactggcggaactcggccaatgcctttccaagaataggaatgcggccagctatgagaaattcatgaacaggaatacaagagtcggatagggagctggtcacccaaacagtcccctcgctccgtacagaaagaaattggctttcaatatccgatgatgaaaggatggctctttggatgctttttccggatgaaagtacaagagggatattcttagcgtcatcttcgaggatcgagtccaactcttccagacctggggttgaaaacggggacaacggcaacatatcatcccaaaggctgctttgctcgacattaatttgttccctggtcacttcgcagtcacgttgagccacggcgtaggccccaaacgcattgctgcgcactgccactgcccgtgagagaccaggtatgcgggcaaatttatattctttcgacgctccctccttgttctttgtccgccgttcttttctccacgcagatccagatgttgtacagatgataatcgatccgtcttgtccaacatcaacatcactcgctgccatgtatgatttcttaacggaccatgctttaacaggggcggctaatgaatttcgaatctttgcaggattggttgtggacgttaaagccgaagagttatcggactggttggcttgaacagtgaatacatcaccagagctggataatgcacatatggtgttgcctccacacacaatcttgacaacacggtttgcagtcttgtcgtatctggttgccatgaagctatccctgataaatctggagctcacttctagtgggaatgaaagctttgaatagccatatgatgagaaaacccaaacttcgtggttctgcagaagcacagacgtagcacggtcaatggcggacaccatcttgattggacaactgaaaagagatgctccaacgcgccgtggtgtcgtttgtatctcaagcgaacgcgcatcggaatcgaccaagccaagttgaccttcgttcttgccaaacgtatagagaccagaggtactgaagaccaccgagtgaatagatgacgctgctgcacctatgatcgtctctttcttgaacggattgaaaatctggcgaggagtcgtctggatgggaatgtcgtttttgttgctagtcctaggaaggccatagccaagttgtccgaacttgttgcttccccagctgaagatctcaccctgctcggtgattgccaggctatggtcttgacccagagcagccgataagactttcttcccctctagtccacctgtctcaatacaagcaaaggtgaaacgcgtcgactcatctcccgttcctaggcgccctccaggaccgaatccacacatgaacagattagcctcggggtcatctgtgattatggcagtatgcagtttggacataataatgtcttggaacttcattggcttgtttgtgatcaaagtgggcagctcggtcgttttggtcttaggcacggtatcttcgagccctaggtgttccaatttctcgtgatattcacgataaaatcgatgcaaaagatgctcagggcgcttcaatgagatgcgctcaggaaattgtctgtcatcctgatcccctaaaccaaggttcaggtttttgttgcttcctaatgtgaagacttcatcggcggcaagatccacggcccctttcaggacactcctaagagtgtatgccccatcttccccatcatctccgaagttcgacgcagcattggaagcaacatcgctgccgagggcatcatcatcattatatgaacttggccagttttcagagatatgcttaatgtcgcgggctctaatagtcgccccgaagacatcaaaaggactgcaaccctcacgatccttgatcttgataaggccaccacttggatggctcgtatttccacctttgctgaaatctgtcatgtcctgcagatcgcgcgccatgagcgccagagcaattgtggcgttcccggcataaagagcccgatgcagagccgtccacccactctcccagtcctgcgcatatatatcgataaacggaacttctaacaaagcacgtgcaaatttggacgcggtaggtctcgaggacgaagcgacatggtgcagcagtgtacggccgtaatgatcacgggcgttaacatcggcacgcgacaaagtcgcgctcccacgcggtaaggccgcccggtcaggcacaaaggccccaggggatgatgcgatattctttttatttctcggtatatttggagacgaagcaatcatggacccagggcttccagctttcgatgacaggtttgtcgcagctctggaggtccctcctgagcctccggcagctcgcgggcccgcgaacgtcgcgttcgccagagaccgctggaaccgctcgacatcatcttgaatgaaacactcccaaagcttattactcatgtgcccggagtggtcgacgcgccgaatctcttatcaggcccaagctgagcgtcgccgtcaccacagtggggtggaccgcgacgggggagctaggtgataagagaactctggttcaaggggaagggtaggaattgccgacgctatgggtataggtcgacgcgatcgtggtgtcacaatttttgatcgtggatttgacgcgaaatggattgtgggctcggggtttgcgcgtgtggcgaacgggcttatttgcgggcaactcgaaagttttgaggaagaggaacgaccttgggagggatgctcgacggagttggaagatctgcaatgtctcgagatgtctagatggttggaagaagcaagatgtcttgagtcgcacttagcagaaatccagccggtttgccctccatgtcatccgtggatcgtggagcactgcgcagtggacgataatgacctccgggcccaaaccccacaaatacagtaagtagtagtacatctatatcgagggttcggacttcccaaactgctctgaatatgtagttaaacatgtcttttaaatgagtaacatagatctaaaagcttatagactcaacaacttgccttgtaagccattatcggcttccaaagcactccgtagaatgtaaagaacatagccaataagctatatactacgagaatccgtattatattcccagtggacgttatcaccgtctctttccaacctctggccaataacgacgcgcacgtccctccatgcccccggacgagaggcgaggatcatccagggcagagcccgtggggaactgataggatgatgttgtatgtatgacatttcatttcatttcggatttctcatctagaatggcctgacatgcagatcagatctctcatctagaatggcctgacatgcagatcagatctacatcataatctttcgaccaatttccaagtccggaatccccgtcttcagctgtgcacgtcgccggctcagcgccgcattctcccccgcaatctccgtcaactgatcctccgtcgggttcgcaacagactgaggcgagaaaagtccaagcggcttgcgtggtcgggtgaacagaaagtagccggtggctttgagtgcagatgttgtcgacaaaccgcttagatgcaacatcgtagtaggcagccaagatgtcatgaatgtaacgaacagtgctctcggtgttgctcattggagcttttgcctcgtcgtcggtaggctcatacttctcccggtggctggtggaaagatgtcagtgtatctcgtaagtcgattaggttagtcagacacaccttctcttttgagtttcctcaaggctctcataaaatccgtcattcaatgtcgttatgttcatgcgctcgacatcaagaaccagcttggcctgctccattgcttctctgtatcgcttcgacagctcatcagcgagaacactcaccagtttgtcgcaaatttgctcatccgggcaggtgactccaaggactttgagaataaaggcatgcatgatttcgatcacatccctaacatatccgagcgcgaggtcggcccgtttcccagattgccggttcatgatggtgcacaataaagagggcggaaatgtccccacttcgaatccgcgagaagtacaatactggtcctcgatccatgcaagaatgctgtcggttgtgggcttttccacaatctcttgctcgtgaagaatgccatcaatagcgccactgttgtccaacacacccatgtgcttgcgaacagtgatttcgccaccatcttcctcatcctcctcatcttggatatcggaaatctcactgacgaactggtattcaagcccatattcttccatttcggacttcaaaccttccatgcggtttctgactattgttgtcagtcgggtatccttctctttgtcgaacaattcatgtgtgccgtatgaagttgtcatggcctgcgaaacaatatcttgaaatcgagctatgaaatcgagcaggaagcttctctgctactccggggtacttcgctcatttccaaaagcagacaaatcatgcctcatggccttcggctttcgaccaacatcggtacgcatctgcatatcaagtcagccaaatctacaaacaaaacgccagacggtgtggcataccttaggaaactctcgacgaatttgagtcgtttgcacctcttgcaggcgaatcttgagggcatgaattccaactttgtccttcggaaggttgctccatgggtgattctcccgaaagaaccgggcctcgaccaagtctcggtcagaactctgatcaagtagctgttgctgggcggcattgcgcacaacaatccagccaagcggtaaggaatgagatttgccctcaaccaagtcgatgaccttgttttcagcccccttgtctaccaaatcgggtttagtcaacactcccagggtgcgaatttcctcgggatcgcactcctgcgccatctcgaggatctcgtgtggctatgtccacatttgcgggaacgaggtttgcgcatgtagcccaggaccatcttcttcaccatctccatatccagcttggtagtgagaccagatgcagtgttcttgaaaatacctgggacatcaatgatactcaaattatcttcttcgggtccacagatctccaaccggaagacatcttgagtgaaggtgggcttgaaagggtcggtttccgagcccgataaacccatggtctggtgaatctatagtaataactagtcattacaagggcttcagttatgatttgctcaagcagcgaaacttacctcttccatggtttcagcgaaagattggggtcgagtgattccatattggctccttgccatgctgccaagcgagaagcgtgctctgggtctgtgtcgggtgctggaacgatagaggcagtgacagtcctctttttgtccgctttgatccgtcggaagatgatgtgagtagcaaactgagtgcaaagtccactatccctggggaacggcaacttggtaagccccttaagaacggagctttttccactggattggtctcccgcaacaacaagctggggcaagttgacgtattcaccaaggttgtaggctaggagccggtcaatcttgtccagcagaactgggtcaccgagcccttggccaggcaactttggagtagacataacggccacggtggtaggggatgaaaatgtgtgacgttagaaggttggatttatatcatcttctgaatgaataaaaggagagaaatggtgagtgagaatgggaaatagatggggggaaggagaaaatatccattcctgtatatctttcaacttggactaggtttccagaactttccgatgatctatgatagcaatcatatcctcttcatctacccagtttcaatggagtcgcattctttgagtctttattagcacccaattgagaatcacctcttagcaaactgatagattcaaagaattatcattatacatacttcctgtgctctttctaacatatagcattatgtttgttttagaagtcactccccaaacattttttcactgacccccgtacgcagtattacggcgttcgatggtcaaaccccggcggtgtccggttggattggaactcgaagccaacaagttgagttgttcgtcaagttggacagctccgggttttgaccatcgaacgcattcgttcgcataaggaaattgcttccgaacgtagtcctgaaggtccgcccatgccgcttgctctttgcgccgttaatcgtcgcgtacaccgtaccaacaggccgcccttcttccttgctgaaacggctagtaaaagccgacagatcggggccgtaccactctaggcatttgttcaactggcggctgacaacaaaggatctatcatggaccccaagattccggaatccgtactttccacttccttccattcacatgagcggttctttgctcataacgtcaaagaagatctctgaaaccgaacgccccttcacaggggggtcgtaaataccgccgccatcaacaaacggtcttgttgcgttgcatggcgcaatatcgcgccgcattccattacggaaagcaaagacaagaagcagaacaccttcggcataatttatcgtcatgtgtagagacaactccttgatagtaacggtgtcgaatgacgatcaatcatgccgaaggtgctcgggagtacagcgtacttatccgctgacgacggaccttggacatagatcgttcagtgatcgagaatattgaccttcggtatctggtaggaccgatcaaactgcgcgggtatcaactgcacaggtacactccgtggggggccacgcttcgcctttttaacagcgcgttgcactttagcctcgatatacttgtcgagagaacctcgggtatacttcgaagaagtacgaccgcccccccggcccnnnnnnnnnnnnnnnnnnnnnnnnnnnnnnnnnnnnnnnnnnnnnnnnnnnnnnnnnnnnnnnnnnnnnnnnnnnnnnnnnnnnnnnnnnnnnnnnnnnnnnnnnnnnnnnnnnnnnnnnnattgctggaagaaggcccgcccgccgcgacggcggcggtattagctcttagccttaccggcccaggatttcttaccagttttgaaagccatttttgttatttagaaagtttaacagatttagaatgaaaagggactaccgtgccatactatatcatatataatataacattggcggaatgccaagaattcccctatcggatcattttctcagagttccagtctttagttacttagaatatcctttcttagatacagttacaacttgaccgtctatatactataggcaatactatcatattacccgagactaaccccttctgactggttagcttacacttatctgactaatagttagtatctccttctaccgactggtaactaggtccctcctattcctaaattttacctaatcggggaaatacgttgagactcagactcaagtttttagggcaaagtaatagtagaagtgggtccacttcattgaaaaaagtctgtccaattagattcaacttgataaacaactccacttggttgctgcgagttccaatcctaccggacaccgccgggttttgaccatcatacgtacagtacatgggtatcagatataataaggtttgcgggccgaacccatgttctccgtacccgagctcctctgccaaaattattgtttaggttaactatttcagtgcacatactaaattatttgcatataacaatacaatggggcagactatctgtgtgatactaggacattcaggcccgaaggatcttccctgtcgttcagtcacctatatcaccgggaaatccattagatagtccttgataacaaaatattgggagcgatcatctagctatccaactatccatttagtagtttaaagaactaatttttgttcttttcgtacttggattaatttcaacccttttgaatattaagtatactgaaatgaaaatgtggcataatcacaggtgagaataaatttttgttcgacttctccgatctagcccgagggctcggaatggagcggcggtcgccccagcaggttggagtaatctcttgttagagacttggatggtaaaaagatatattaaaaagcaaagtcggacacagctggatcgcaaagtcaaagtaagcagaatccgcacaggttattcacatctttttcgtcactcccagagccctccaatgccctatcaaacccccagtgcaatggatgccgcgaagaagagcaccaagctcgcttgctatcccaactgtttgcacaatttctgcagccaccctcgatgcttcaatctaactacttgtctcacttacacagactgtcatgtatgcggttcgagaaagtattttattgaggtttggaggctttaggaagttggagccggggattcagcagcctcttcctgggcatatttggcttcggcgctagcaaaggcagcgtccagctccgtgcaaggctcatagctggcgataccaacaactccgtcatccttgtccttcaggtagtaccctccattttcggggaatagagagccgtaaggttgatctttggccatgtcgtggagggcctgtctatcgatgaggataatagagtcacttggaggcgtggcctcgtcgcgggtgagggcttcaaccatggcggtaaaaaggcagaggaagggcacgatggagatgaaagtgaatttcatatcgaatgaggggcacataaggatccctgtaacgagtatgtgtcttagtcatctctttttatggtccacaggtgtatcgtgaaatcttgaggcataggttgcccttgaacataccttatgattgattgaaaggaagtatgagactatgatagcgatggaaacatgatgtcttctttatagcacttggatgtgactaggtcagtcaactgtcctccctgcagacaactatatagtcaatgataagtaatcatatcacgttgaatgctctttgcaagtgtgcccatttttcagttatttcaaggattcatgcagccaccgccccaggacggaggggtgacatgcattcatgagaggtttcgcccggtattacgaggctagagggttggaatgatctaagacataccagggtctttcgaggatagggtgttcaatggattgttgctgtctttgtggcttttgtggtggaactgtgagaatgtccgagataggcatacaatacatgtatatcccctagtcaaacatcccaatataaacaagccctgaccggcgggagatgccgccgttccggatgtatacgactacaggaaggacatattcaagtcgtctgaaatagttgatttgaggattgctagagttgctttgggaaacataatactatgacatcaatacccttcaatatatatgttagcgcttggacgccgaaaacataccaactatgcccagcttgaacacacccatggacctatatagacagatgacctcttggaaatgcctgctagtaaaataaattgtttataattttgtagtacgaaaccagatatatttagtgagtgaggctaaccaaaaaaagaaaaaaaaaagacaatgaggctgacccgatttgaacggataaccttgcgaactggagtcgcacgcgctaccgttgcgccacagccccttgttcgtgatatttaacataatgattagtatgttaaaggaaaaattgttatccaacccttcactagcctcatgctacgtagacatatactctgactgaacgaataatttcgaaataggtatagaagcagtcagcccttgagagcaatggacttagtaattatgatagcttggatcactgttagcatttgttatctcatgggtagcaagtggctgcgctaatttatagattgacctctttgttagaccaattacaggactacgaggcatccatttgaggatgctataacagcttcctatggcttggttccgttgttccgtttatcttgggctgatttttatctgtctagtctactccacatgagcttctttgaatttcatacggaaatgccttattgtagggccccaatagtacataacccgaaagatttccggcttgatgggtgaatttgagggatttgggcgatattttcaaaaatggtgaatatgccttcttttttcctcctcctgttgttttccttctggaattgtatatgtggcgcccctgaagagagtttcttcaacaatatgtgatccactactactccgtatgcgaaaaattcagctccgggccctccgatgtacggagtacgggtgggtcttcactctaaaactaagaggcaaaattagtcaaagtcctgaatcccggcgagattataagagtaaacccacaagagcttagttagacagcgcgtaagcctaaggtctgcagcagtttagaagagctgctcgggatgatcaattgtggggctaaactagcgcatcccacagctcatccattattctgggatttggtgaagaaataaagctggaaaatgttgaccgaaggctgaaatcataacaaagaatagaagctataccgaaccaaagaccatatgcctttaaaacataaaaaaaagttgaggatgtccatcgctattgaccatggactcgatctcacccgggtataaccataggatgttgtatgtccacgtgcatatcataaactagatccctatatcacttacaacatatgctcccctctatcctctcatttctgcttctaccaatcggtcttgtatcctattccaaacctcacttctgattaagctccacacttaccaaaaggggaagtgtcatctgcctcccaacatctctggaattttgtctcgacagaatgaagctgaaaagtgcaacccaagtcctttcatgtgaagcgccaatacaaagttagcgtcagcatcttatgcaagagcctgctttttgcaagatatcctccgcatcttgaggggtaacgctaagacaatgccggggtagagccctcatgcgcaactaattgggtatatacggatgtaggatatggagctaaacgtgcttactctggctcgagtcgtattcactacgtatctgtcgcagaagaggtttctccgatacaaatgtctcaataatcagcctcggatattggatatcatgccccccagacgggaacaaaaagaaactttgtgcggggttttggcgccgatcttccacgagtttgaaattttgttaggccccaacttctatttagatgctgaaggaaaaggaaggtaaagaggtgagtctatcgataagtgtatttgcatatcgacctgctaaatgtgttcacgcttctgtaggcagaagatatcaaacaaacctcatatcagggagtctgaaaggcatcagacagaccatgtattgctccgaatggtttatgcacggagtatcccccgttgccatgaacaggtgatgatcgtcgcactgttcaccggcctcggtaatctatatcaatcacattcttagaagttgtttaagtatataatatgagaatcgtcccgctctatcatgtagaataacggccttgaatcccttatatagagcaggaaaatggcattgtcccttgcgctcatggtgcgcctagccctggttggcctcgtggtattcacttcaattgcctcagccctgccggcgcctcaagtccctcgcagcacggttcaggaccccgacactgatccgttctatcagccacctgctggcttcgcatccgaggcgcctgggacaatcctgagccaacgcaacatcactgccgcgttctttggtctcgtcccggttgacgtggaagcctaccagctgctttaccgcacgactgcaatcaatggctcggctattgcaacagtcaccacggtgtttaagccgaaggacgctaagcttgatcgtttcgtttccttcgccacggcctacgatagctctgcgacgaaatgtcagcctagctacacctaccagcttggttcgccacaggacagtttgatagcttcggtcgagctattgatcattgatatctaccttgctcttggttacaccgtcgcttctcctgactatgagggacccgaggctgcctttggacctggtcgcctcgcaggtatgggtgtattggatggcatccgtgccgtgaagagcttcaagacgttgagtcttactgatgaccccatggttgtcggtataggctattcaggtggtgccattgctaccggatgggcagcctctctgcaacccctctacgcgtcagagctgaacatcaagggctgggcgcagggtggaactcccgcgaacgtcactggcacaatgtatcagcttgacaacacagccttcagtggcttactccccccagctattgctggtctcataaagccaagcgcctatggtgcttcgctgggccctttcatcagcgagatcataacggctgaaggccaacagatactcgacgccgccgttgccgaatgcgccactgcggatatcgcggcgttcttcgaacggtcaatcttcgacactagcttccaaacgctaggcgaaaattttattttcgacccgatcgctcagtcggtactaaagcagaacaccatggctgccaacgaggacgagaccccgacggcgccaacctttgtgtaccacgccacagacgacgaagtcattccttatgccgatgccaagactatggtcaattcctggtgtaactggagtgcaaatgtcaagtttactacttatgccagcggtggtcatgcgaccactgaaatcattgccattcccgatgtcatcaattttgtccaggatgcctttgctggcacgaccgcaagtggctgcaccacgaataccgagcttggtagtattcttaacccacttgctcttggtgtggatcttgagccaattcttgtggagctcattgatgcgctgttcaatctgggcgatcaggactcgaaggtcaagaacgaccccgttggagtgctcggcacaagcctttaagcgaatgctgacatctattatcattggtcctgatgagcgttgagggtttgagccgcaactgtttctgatatgcacatggttattcgctctgccacctttggtgtctttgtttcctttggctaggctttggtatcctttgtgggacattataaccttttctgtcagcacataatgtttctcaccaacaatgagaaggcagacttccgagtcgagcttgtgttgatcaatggaatgaagtccacaggatatgacgttggatcagataacggtgtgacctgccaaaatatagtatggggaaatcttggaagatgtcaaagtactcagatataaaggatccatcagctgcctatacctggctgtctgtagcctccaagtagaacgtcttgatatcacgccttgtaagtcgtgatcaagcgcttatcggttccaggggaccttgccccgggtacggcgatccttgcgaccgtgcatgacacccggcttgtccaacagcctgtttccaggtaaaaggaagttatacaagtgaaaggagaacaggagcctagtttatcaagaagataggcagccaaccccccgtgtttgcatcatctgtgtggcgttctaggctgactaggacactcgagacctgtcgagtcaccggatgtgcgtcacagacgaactatcttcattatcacaccccttctctctctctttctccgcatccacctgctttctcattcttttcttacgagctttatcatatttctctcgcttctctacacccctcacggtgattttatccaactgcatttgcccgtgcggagaagctctagacctgccccgaaggtcccaggccggagtcaaccccagaccacatgctaggcgcccattgtctcattgtgaatcatttagcgtctcagattcaggaacattcttagaagattatcatcaccttctctgttagcatggccctcagtcttggatccatcgctgcccgattgcgttcctgataacagattccggcggtgataacactcatatccagcactccccggtaatgccgttcttacctcttgttcgcatgcatgtcgatggtcgctaaccacggtgtcgcaactagaagaccaccatgcatcaacatccccgatcatcggcggtgccgtctccgccgccaaaccttccacccagaccgacagctcgggacgtccgcagagaacaggaaaccgccccgagctccccaacggtcgatatggggtctaattatgccagggggctgggattagagccgggacctcaaccgtccgagcaggggaggaatgcggcattgggcaaggaggccctgacccggttaaaccagataatatcggtatcgtcattcagatcgcccctctcatggcttatcaggatagctcattgacggctaatctccttttcaacagaactatcacacaaaagccgctttgattatcctacattcacgagttgcactgcctccctcctttaacaagggctccgattctcctagagtcaaccgctgggtatgtttccaagtcatggtcggattcgcgatgctttttgggatatcaaggcacatgaaagtggcaggcgctaactctgtttgtttccctccagttcaatgtcgagttagatgatacagatgtccttcgggaacccctgcgaccttggagaacatgcgatgcaacggacaaccgaccaccacccctcgttatcgaaacgtacttagacacaaagggcctcacaaataatcaaagtctggtgattattgacgagaatgggaagcgttgggatgtgcgtgagtcgcttgcggcgcttcagggtgcccgtgcaaagccataccaatcggaaaatgacgagattatcttggagcggtggaaaatcgaattgggagagtgctccagcaggcctccggcagatttgggctctatcttgccgactgtgtataagaaaagcattgtgctcttccgttccttgttcacctactccaagttcttgcctgcatggagattctctagacgcaacaaaaagttgcgacagagtccggccctccagatcaagtatcgtgtggtagatgggagcgctgctcgtgataacctcccactggatcatttgacagccccgttgagcgagggaagcgaaaaagtggtggacacatacggctttggggtcacggagtcgcccgcaggtcccttctcagttcaagtcacgtatcggacgaactgcgatttccgtgttgacgactcagaagcgctactgagctcgcggtttatgggtgccgacgacgagatctttcgtccgtcgttgccttcagatgatgtcaaccgcccaaatcccgaagtcggttctgtgccagtggagagaagggccgttgagagcccagattgcacacgtgcatacggcagtctctccacctttcatcaggttggcccaacaacaggtgcaagtcctatatcagcactccgtgcaatgagagattcgggcgcgggatctccttcaccgacagagtcacctaagagactcctcccttctgccaaagtccttccttcaggacgtgcggcgcagattgctggtgaaagcggagggtcaagtttcccacgtcgtccctctgtctcattccaacccttcaaagctccctctctgtctgcttccccggctttagcagactctcccctgggaatgtctccccgcaacacgtcacgcatctccacaggtacatctgccgattcccgcgtcatgccgcccctttcttctgccgcttcagcgcgcagacctataaccatcgcatctgaacaagctatatcatcctctaattccgcatcccccaagcctgctccgatatcccgttacagcagctcctttagccaccgacgaggccgcctttccgtagggacaaacagactggaagacgacaactccagtggccgagcgagtgcgacatcatccaatgcacagcccgggtccggcctacttacggaagctacgggcacgagtgcggagtctattcacgcagatgacgagaatatctccgactttttgaagatgcttgattcgaaaaaggatctaatgaattcatccactgcatctcttcaacctggtcctaggcaggcgaaccccaccgcagtagctcttgctcgcttccgcggtatgcgagattcaaatgccgcgttgtccgactcaatgtcacagtctatgcacatgcatcgctcttctctttcttcgagcaagcaattgtcaggggtcccaccgatggttgcgggcacctccgtctccacagcttcttctccgggcaaacccatatctccccacactccccacacgcctgctatacgatctcgtctaagctcgaacagcgttgctgatgacattgagaccgaccaccgttcaagaatccctcgctcgcaccacgatccaccactcgaagaacattccagcgcagaaaatacgcgaggagcttcttctactgcaggggctattgatattccaacatcgccgcggattttcgaccctgcttaccgccgctcgagctccgcagccgtgcgccggccagtcgttaccagcgacgatgatgaaatattcccattcggcatgcgcagcctcagtctgggggccgatgagccctctcacgccaccctagctgccgcccaacagcacaccgagtccctgaagagccaacaatcaccggccgagggtcgaagcggtccatcccgctctgcagcgggtccgtatcgggacagtgcatccctccgcggacagatgtctggaccaaccagcgcctcagcctcctccaacccccatgtctaccagccccggttcgccagctcccgtggccgcggctactcgggcggacattccgtcagctcagcatccagcagcctcgcccggggcgccaatcccgcgccgcatctggtggagcgcgaccatgaccgtgatggaaacgccagcggaagcaacagcggcaactccacgttagagatccgccgtggttccgggcagcggccgggcgcggttcggacgctttccggacaagcgcccgaagacgatgagccgctgctcttcgcgatgagcgactttggtgtctcgcggcgcagcctagatgaagttcgacacgggaaccacggtggggctgaatcggctgctgggtcccggcgcgggagtgggagacggggagcagggctcccgggcttccatgtttggtcttgaagtatgagtatacattggcattctaatgatgctttattttggatttctattctatcttaacctcctaggtctcttactcttccccacctccctctcaacatcatcttatacaggcgattgggcctccattcaatttttgacgtttgatttccttttaaaccatttcctacttgcgcggttggctgatttcatagattgaatactccaatcacagattgattactgcgatgtgcatagagattgggtctcgttattgttcggttttgtttcgggcgtttttttttcttgtttatttgtcgttttccttcttctttcttctctgactcctatttttgttttcacttcacttcgcttccgaagttctgggattgctttgctcatttgacatatcccctctctacatgattgatacgacttgatggtttcttgggggccgcgttttctccttatgactatatgattcttgatctatttgatgatgttggtggtttttacttggtagagttatattatctattaaaaaaaaattgaaacactttggattcgtgcaagggagaaaagattgtgcctataacggcaaaatatcacatggaacgattaagcacttccagggggctacatacttatcctgtgcgacatatccgagcccgccgtatttcagcgaaggcttggatagccatctctccgatgctacgcatgctaatggagaaaccgactgctctttgacaccgtcacacttaactagtaggtggccgagaaatggcccaattacttcctccacactccattcgggccggttctactatctaaactattctatacaaagggttaagtttagaccagatcctagctagaatatacccgcgttaagttagaggctctactgagttctaggaagccctaaggaaaacccggcacgtatagttacatatgtaccggataatgcctggcactcgagacctttccctttccgttttagtgctcacctcttgccgctttttgatcactgagtaaaacggagcacgtccctgagtaactagttagttaccctgacttgatcatgggccattatataatcaacgtgatctctgagtaactactgtgccacgtgatcaagtttaccagctgtgctgggctccttgatctccttcttcttcgacaactattgatatcacattctcctgtcggcttacggggagtaactctggaatgaacactataaggccgtccattcctcgtttgtccgctctacttcgcaataaaccgtttcccataccttctccggggctacctttaccgcccggtatactcgttgatgaagagatctcgccggtatacgattccaagtacttctacgcagcgaagcctggagaggtactcgctgatcgttaccaaaccctggttaaggttggctggtatatatcttcaacagtatggctcgtgtgtgatttgtaagggtagtctttaataatttctgtttaattcgaagctctctccatctctaataaatatataggtatatcgaaaagccagggagtgttatagtactaaaaatcgctaataacaatgcgagttccgctagtcatgagcgtggtattaaagagcacatttccaccgcagacccgtcacaccgaggccgctcacttatccgaatatctttagactcttttgaagttaaaggtccagaaggttcttatttgtgtcttatatatccgcctataagggagccattgtccatatatcagcggcgcttcgaggatagaaagataccactgcccctcattaaaacatacattcgtactcttcttacagggcttgattatctttataaagaatgcaggatagtttatacaggtaagttcatccttagccttatatcctgtcggtgatactaagcccaggcggcggcctagatctaaagcttaaaaacattatggtctcattcgaggatccaaccgtacttactgatttcatgaattctgagctcgaaaaacaatggctttcaagattgattcgacaggacgaccagtgtatcagtcccgtaatgacttcgggccacttaaaagcctgagaagtataccacagcttatcgactttggcttggcaaccagactcgaggaagacgacgactacggcatctggcctattcagccagaccactatcgggcgccagaggtgatattgggtaatggatggcgaatgcctacggatatttggaatcttggtgttctagtacgtcccgcttttctctaaagttgttattatccactaatgccggaccagttgtgggatatgatcgaaggaaaagagctatttcggcatatccatgatcaacaaggtcgttacgatgctaaactacacctcgccgaaatgatagctttactcggtccaccccctccagaggtcatacaaaggtatcaatatatgcgagagtactcgtggccggaacctgtcagacgagaagacgacagagtatgcgagatcgcggaggagtacttctgcggcccattctttgacagtaatggtatcactaggtttcctatcttgaacgaattattcttagactcacgaaatatcttaggtcgctttctttacgaagacctgatccccgaccggaaactatacgacacagtttccttccttgaaggaaaggagagggaagcgtttctggatctcgccaagggaatgcttgtctggcatccagatgcgagaaaaacggcaggcgaactggcggggcatccttttcttcaaccaaaacagacaagcgcctgattgctgcgagcgtttgctagcggaatgactcaaaatcgtggttgatcccagttcggcggttccatcaaatggtcagttgaagcgttaacgtagttgtctttttgaatgacatctaatagagtcagttgatctgtttttgatcggaaagtaatagcattatgccttaaatgggatcgaagacatcgaattaaatcaaataaatcaaattcccaaggtacccccaaaggggtatcacacccgttgaacattcgcgcgagcaacagaggaacagggtgaataaatcaattaaattaatggattgaagtccagaccctccatagcaggcagcctcctaaggaaacccggtacgtatagttacatatggattgctattgtatgtaaatgcacctaaacgctgacatcacattgtaagctcgtaccttccgtataaactatcgcctccctgtatgtaggtagtctgtggaatgccctatttgcctatttaatacgcgtcacagctatataagcagctcctttacttgtttgtagagaatcaactcttcttctctttccctccttcgctctctgagcgtcttaacatagttacgaacttcacatcaacaatcattcgcacaacaaaatgtttgatagaaccatctgttgctctttcttgcttttggctctgtctagtaagtttgacctcagcttgatcctattttgacctgattttgacctctcttttagctgcaatggtgattcgagaggagggggtcgagtccctagtggcgaaactcgtccgcctggctgaagagaagagaagggtgattgagtgatgagcaacgtggccagcaatctcatctggatgatcgttgtctgcgctgcggccctatagcgcattgaatttctcttactggacattgcggagattgttcgaccggtatgtcgctgtgtcccatgcacataatcttgcccgcatcgaattgtgaagttattctcacttcctcgatatcaccggacatccagctcaccagattccttttcagttggccctcactagagtatcagcccgctgcaatctcacctcggtagcgcacatctgaatgttttgtgtaaggtacacgactaacatatacatatctagaccagctcgttaaccagatgagggataacaaggctgtctaaggtatcttatctatatatacgctcagagctggtgaccgacgcagggattttctgacgctgacagaagagactttgatcctctgtgaaaaggaaactaattaccaaacaacgcgatatcatctttgaatggacagacaatcatcgtctcgcccaacgagtccctcgaaacaaacaggtgcagcgggaagacatctggcagctagctgcttagcacggtgctcgggcagatattgcccatctggcagatattgcacacttcagcaaggtgcggtaggagctctatgggactgtgattaccgattcgggcgcgctttcccctacagaagcggagtccaggagacccccggagcccgccgttgaaggatcgccgatatggattttctcgagaggattgaccttgttcatacgataaaccatcaccttctgggtttcttttcattttaaactatgatatactcgctgccaagcgacatcggcgtcgggagcgatgttaatatacgaagtaagtgataagacttgcgagtccactcaaaatatttgattctcgggagttgactgagcgtgttcgctggtaaggtttaaaaggcgaggtctcatgttagtttgaacgtacacttcataccttgtattggcctgtgctaagtagaggctcacttaaatcataggtagcagagagatatgaaaaggaaaaacaagtgacttcgttacggatcatgggcattccatggagacatctaaatacattgaacatccgatttttttaccctgctagcatacctcaacttaacacgcttatgcgatgtaggtcgaggccgacacgtcaccaccacggccggtccagttaacgtggatatccttgccctcggggaaggtctcgctggcatcctcgggcttgatgcggaaagtgtgggcaccgaagtagtcacgctgggcctggagcaggttggcaggcaagttcttggagcggtaaccgtcgtagaaggcgagcgcagtggagaaggccggagcagggataccccacaaagcggtcttgctgatcacgtgacgccagccagtctgggcgttgttaatggccttgttgaagaagtcgtcgaacagcaggttctcaaggtcggggttgctgcggtaggccttggtaatatccttaaggaagacggagcggatgatgcagccaccgcgccacatgagtgcaatggaaggcttgttcagcttccacttgtactccttggcagcctatattggggacgagggttagaaaaccgactatcagtagcggataaaaaagacttacgttctggatgagcatgaagccctgggcgtaggagataatcttggaagcgtacagggcctgctcaaggtcgtcgatgaaagcctgcttgtcgccctcgaacttgggtgtgggaccgctcaggatggtgctggcacggccacgctcgtccttgagagcactgaggcagcgggagaagacggcctcaccgatcagggtaacgggcatgccgaggtccagagcgttgatggcggtccacttgccggtacccttctggccagccttgtcgaggatcttgtcaacgaggggagtgccatcgttgtcgttgtagtagaggatatcacgggtgatctcgaccaggaaagagtcgagaacaccgctgttccacttggcgaaaacatcaccaatctccttggaggagagaccgacaccgcgcttcaggatatcgtaggcctagatgacgtcagtgatcgctcgagaatatcttgcagcttgagaaggtagccttacctcgcagatcagctgcatatcaccgtactcaataccgttgtggaccatcttaacgtagtgaccggaaccctcgtcaccgacccagtcacagcaggcttcgccgtcgctcttggcagcgatgctctggaaaatgtccttaatgtggggccaagcggcctcgttaccaccgggcatgagagagggtccgtaacgggcaccctcctcaccaccggagacaccgctgccgacgaagctgatgcccttgccgttgaggtattgagtacggcggttgctgtcggggaagtgggagttaccaccgtcaatgatgatatcacccttctcgaggaaaggcaaaagggcctcgatgaagtcatcaacgggcttgccagccatgacgaggagcatgatacggcgggggcgcttgagcttggcgcagaactcttggatggagtgagcaccaatgatggacttgcctgttttgtagtgagcattttttgcaacggccattggaacctgttattctctggattgcttacccttagcctcgttcgccaagaagtggtcaaccttggagacggtgcggttgaaagcgcagacggtgaagccgtgatcagcaacgttcaggatgaggttctggcccataacggccagaccgatgaggccgaagtcagcactaggagcaaagtgcgccggagcaccgacattgatgccggcgagacgggcgctatcgtcagcgaacaatgtctcttgtcaacagatgggtaaaaaaatgacaatgggagcaaaagagaaaggaaagccgtgctcttctgaaaaaagatcagattcgcagtagctccattggtatcatcttgcgcgagcacctatagggattgggtcttccagatagagctgttgcatgatgtctgagcagcattgaagatccatgcgctctgttatccgtcgggaggcgtaaccgctgggctggaattggtgaaatggggaggaaagaaagatgacttacacagcttggtcagccatgacgattatatgtgagatatgatattgattaaaaaaacggtgaatctagagaagagaggaagatgaagagagagaggaggggaagaagaagaagtagctcggctgacggagcaagtcttccgtcatcctgtgggacataccgggggtaccgtgtaccagcgtggttcttactgtctccggtgtagcgccaagtactaagtacaggagcagagtcgtccggtgtcaacccactcgggttctgcgacaatttggaaagcattatccgacccggtttcaattccctatatgctacgtacatcctctgttggatttccggtttacacagctttatagtacatggcattgtagcttttactctgcaagagcggggcatggaggggtagcttggaactgaagaatgttatataacatagcaagtgtatagtaaggtatcaagcagatgatgaagtagcagaaactcaacccaatccccatgtaagtcacctaaaccatccacacatcccatcccaccattttccacgcatcggtgaactgttctggttgcgacggagaaatcacttgccgatgagttcataaccggctgcacatgggctaggccgctttgggactagagtgggggttacagcgcccacaacggcaatgactcagcaagagggctgggggggcttatgtcatagctgagtcaggaaagcttggttgagtcatgtgacacagccatcgcagacggcctggccagcgcatagacagagaagccatttctcatctctcggattttccattaagcgttgccatcccgcctaatatttcacgacgcgcatttttataatccttcaggccacttacagtgactataagcggcggaacctttcacctcttgcaagtgctcatctttcgggtgcctatctcaagcgtgacggtcagtcaggccctgaaggtacgttgcggttgctacttcgcatctagcattctcgtctctccatctctcgcatctcatttctctctcccccccccatttgaatatcccattcatcatgtcccttccgcctcctccaggtctcaaacagactccctcgtcacttccgccccgcccacctccatcctccaatgccgcgcagcctcccaccgccaatcctgcaggctatggcgggagaacccgaccannnnnnnnnnnnnnnnnnnnnnnnnnnnnnnnnnnnnnnnnnnnnnnnnnnnnnnnnnnnnnnnnnnnnnnnnnnnnnnnnnnnnnnnnnnnnnnnnnnnnnnnnnnnnnnnnnnnnnnnnnnnnnnnnnnnnnnnnnnnnnnnnnnnnnnnnnnnnnnnnnnnnnnnnnnnnnnnnnnnnnnnnnnnnnnnnnnnnnnnnnnnnnnnnnnnnnnnnnnnnnnnnnnnnnnnnnnnnnnnnnnnnnnnnnnnnnnnnnnnnnnnnnnnnnnnnnnnnnnnnnnnnnnnnnnnnnnnnnnnnnnnnnnnnnnnnnnnnnnnnnnnnnnnnnngccgtcacggcgtcccagccgcgcgcggtagcctccagtcaaccgcgtcgccccaacaactactcggtcgcgaatccgccagtctctgctggatacgcaacccccgtcaagagctacgtcaatcaatatcaacaacctcagacataccaaagtgggccttcctactatggacaacctcaatacgctgaaaacacatacggcccgaccgtcccacatattacgaacccgttcggatctacgcccaatacagggttttcacagggtggcaacgcccccggatttgacgcagagacggaagctcaaatcgcgcagtggcagagcgcctacaataggcccaccgatgaccccaagaatcaaggcaaccagccgggttcaggcgtgaacacgggagctggaaccccaaccctcggcgctggcactcctgcccagcaggccgagtcacaaaaaacagttattcgctctggtggtggtcagacatggaccgactcgaccctattggagtgggacccggcacatttccgactttttgtgggtaacctcgcaggtgaagtgacggatgagtctttactgaaggcattcgcctcctacacatcggtccagaaagctcgtgtcgtccgagagaaacgaacccagaagagcttaggctatgggttcgtcagtttcagtggaagtgacgactacttcaaagcggcacgagaaatgcatggcaagtacattggttcgcacccaatcctactgcgccgagcggtaaccgaggttcgcccaacttcggcccccaagcatggaaagcatggaaagaaacaaggcaagggcaagggtcctaagggagacaacgccggtggcgcaggtggaaaagtgaagcaggacggtatcaaaaagccagccaaaacgaagggaggattgaagattctgggttaattatatggatacgccgtttacgtgaagaccgatagtacattttcatggcaagactaaagatgctttcctgttgccaaatgtactattactgaaaaaaattcgaaatatcaaaaccaatttcgttctcgagtaaaagggggctgagtcacgtgaatatacttgtggcctacacttgccatcatcatctctattgcgctggacttgtccttccaagatactaggtatatctcattgagaatctgaacagagggctttcctgatatatttctagcctgctcataatacccttacaatatacggagtgtcttgggtacctaaccacagtatgtggttagtacattggcattgagttccccagcccctctaaaagcacatggctggggaaaaaaaagctctgtttaaaaccaattcacattccagctgaccccatcttctccatatcttctttctcacattcttctgatctataattttccattttcctccaagaaaaaagaggcttgtgtgttgcaagaaccagccggacgaggctgtatacttccgtatacagatcccacccaacgcattgctgcccacctgtacacggcctacgaccttgaactccacgtcttgttttatttttacctatcctcctaccggattgacaagcaacgactgaagctctctacacatctcgccaaataatatacctctctaccacccaagatggtccagcgcaacatcaccatcgcgattatcatcatcatcctcttcctcctcctcgcaatcgctggattcgccatctgggctgtacaaagccacgtctccttcttctccaggaagaaggagaccgatgcagagagtgcggatgggtgataaagcagggtagcatgcagcagcaagcactacaacatatacacccttgacgctcggcctcgggcctctcttggtctcgcttttacaggcattaattgcctcttttctttttcggaatacgcacatatacataccatcacgatcacacacacatctacgactacgaccttatctgcgatacgataccctttctgttggcattcaatactaccacccacgatgacgagctgcgttacgagtctttcacgttggaacacgcctttttttgtacaattgttagcgattggaagcaatcagtacatacgttgctttcggtgtattttcttctttttctttttttggttttttagtgtggagttagaggtcttttgctgagtccttttcttttcttggatgtatttgacgaggactgcattgatgcatattcttcgctttgttgaaacccatggtgcatatttccattgacagtttgaaaatatcccaatttgacaaaatttcggaacaacatcgatctatctcacatcttttcgaagccatataagaagggaatgcctaggtagtgtcccaaggatacagatcgtagatgtaaagatatgtccatcgatattttaagaagtatgattccgacttctcgatacttagacaaccatgtacaataaacaaggggaattcaaatgcactgcctcccagggtatacatatctacccaaactaggtaataaaacatcccatcaccgaaaaagctgtaacatacatgaaatcccaagtagatagagcaaccataacgccccagtaataagatatcatctcgctcaaaaaacataactcaaaagctcttgtgcgcgaagagctgtggcaacatgccaaggcagtgtgttgttttgtacactgcatatgcccttggcccgggcaagacagcccaggtcccggtacatacttaaggtatctttcaggacgctgtcgtgagatacgggaatacgtggggaataaatgagattaacggaggtagcaaatacaccgtccgcatcagtagtgcccttgcggcgaaggagatacccgctggatagggcgggtcggaattcggtgaggtgtggagagctgttgagtcggtgggataggatggctagccaggaatcgtcgcagatatcagtgagaacagtttctgaatcggtttcgagtgacatatccgttggcgtgggggcactataggcggcgggaccggcgctggttggcgtggctgcattgcctgattgttcgggggaagcaacgctggcatttggattaggagtcgacacgggggtagacgaagacagtatattcagcatcgccatcgatacgggtggaaccggtggctcaaggatcaagtcaggaacagtgttgacagccagaatggtcaattccaatgacccaggctttgacttgttgtgctggtctgctagactagcccaggctgtgaatgtgttagcgatatgtcctcgatatcaaaaaaaaaaatacgaagcagtaccttcaacctcctcggtttccatgggctcggtagtcgctagctgaactttccatcgtgcttggaatttctccataatgtgtttcgtcgtagcccaaatctcattccttacttcggaaacaggtctggtaccacccgactgacgataccgcagacagtaagacatggttctttgaatagagcctggcaaatcggaccatgccaccgatatccagcgttgatcaagacttttggagtaggcaatgtgaagacttcggccatcttgaagcggcgaggatctttcaggagcaagtcggaaacttatggctctcggaatggcgtcggccaaaagcattggtggcgcacagagcagggggctcatctccgcatcattggagcgacatcgactgtagacttctaaggccaaattcaaataatccacctggggaggtataaccatcgtttcgcttgacatcacgaactctaggggaattatctgcagaacaagctcgttggcaattcgagtctgtcgtcgttcggaaccggctaccaattgttggaaaaggtaccagaaggcggaacaaatgtcagccaatgctgcagcgtgcgtaattgggttgataatatagacaacatggttatcagcagttgccgtagactgtgagagctctgagccttgggaattgttagtaaagcacataatcatcagagaaaacacataccaagctgctcgcatgttctcttcaatacctgcatcatagattcatagctagatgtttcagatttccatagcttcagcccctcttcgaatgctacagaatcgtctcctctggtatgagttccaagactgcaactttggtagagcagaccaaaccgcctcaagaaaacatccgctgccgttgacgcagctggtgggtgaatacaataagcagaaatgttctttggcccatgagcaggctcaagaccgaatgtctcccaaaaggatacagccgggggaagcgcctctaagtattctttacctcgacgcacacgtatatgaggcgccgataactttgaaatgaagctttttggggggtctttgggcagcgcctgatgttgtggcggttgctgctgtggaagattcgcgacaaattcatcctgaaatgacgtatattttttgaagtccattctcgaggtctcgcccaagagtgctgtgtcgtcgagggcttgcagtgacaaagactcgctctcgagatcaaaaagaccaattttcccatcaagtggatgcttgagggaggactgcgtaatttggtcaaccagaagttgggcaatttcaagttgaccttcatggcgaggaagaacagggagttgttgaggtgggaaagcagagaaataaccggtgagggtccaatcggaaaaattagctagaaaattgccgaggaacgtagagttctcggctgcgtacgcaggatttgcttctgtgccaggaaatgacttctcttgggatgcaactgacattatatcggattctgaaggagctcgtttccgcttcaaagaggggatcgagggcatggctgccggcgttggaacatgctccgacatgatctcgatactatcgtcgctgctgtcactgctcaccgaggctgatcgtagaccattttctgactgaatcagagatagactggtcttgttacgttcttttgagctaggtacgttggcgttgcttcggtcacggcgaggaatgccaatcgtgggtatggcagatgtctgatttaatgtgtccaacgagttaccaccggagaaccagaatttgccagctgctccgtacttccgatcccaatcaccaagtttcttttcgaatgccactgggtggtaatgcccttgcccccggtgacctgtaggctgtcgacgatcgtctgcctcagaccccgggaacaatatcttcttcacttctactgggctcaagggcgggctgattgtttgacctgcgcgatccataggcgaatgagctgattcttcgggggccatgggccgttcagataactgtggtgattcgtggtgtatcggagaggcgtgtacctcatgggtttccaaatgagttgggatttcccgtgactgattgggggagagctctgcatcaaccatggcctcggcctccgattcgctttgaggacggggtgcttcaactgcttcatctgcatcctctacccgagagtcaccctccatgccatcgaaatcagggtcatcgaaaaagctgaagtccgcatcggtgatacctttcgacccaaaatctctttcgttcatttccccaaagagatcttcttcgtcgcttgcatcatatcggccagtgccaattccaacgccactattttgaacgggtgatatatcagatcctggcacatttcttcttgaatttcgttgcgttgcatgtggtagcccgaagtcagaatcgtcggcaaaagcctcaggagggtttggattgttcaacccgactgctgcagctccgtctgggggcgttggatagacaagattcatggtttgcaaatcaggatattgcgcaattcgggataaactctctgtggtttccaagggttcggccttgggtggtgatgccatttcttggtcttttggtcgtgagtcttgggtggtaggggtgttttgagcaatatgggaaatatgatctagcttgagagagctcgccattgtagaccattgctctgcaaaatctagaggttcgtcaagaagggaagtttgagcatcggaagagaaatttgatgagctagcccttctgaagcaaaatctcgctggccacagcatgcgtttcagtggcagtgcagattgactatcatcactctgtcgccatgcttccccagcaagcctcgcgaaaaatggctcccaaacctccacttcaacccagggttcttcatcaattgagtcaacatgtaacccaaaattccgcagccactgcacaacatccaatttccactgtattcttttcgcagacagattcccaggggtggggtggcccagagagggaacggttggcgagtcaatattagccgtgacaagtctagcgatagtcccgctcgggcatagccaaagatcaattccaggctgaacgtcggttattttagaaatgtcgtcgcgtggactgcacagtcgagttatgcccgtttgggatacagtctgggcggagacagttattgttccacttatagttaactgaacattgagtgtagtcaagcaagaagtggagaggatgctctcattgttgatatgggggctttcgtatcctgacttttcgatggcagtgaaaagggttcgtgatccgaggggcagagcaccatggcgtctaatcaactggaggctaattgaaccggtgacagcagatacaaaggaggcataaatggccgctgaactgctgtaaccatcttgtcgtcgagaggtaggctggctctgatgtggccgtggctgtgccgcgggttgggtaccgttctgactctgattgtcggacgacagccccttcactaagtccagcgaggagacacttcccaatgcagagactattgtaataaaattaacaaggccccgaataagtctacgagctggccagagacttacctttcaaagttgtggtaccaacgacgatcttatttgactctgtgtcacttcccctcacatacaaaggtttgaggctctcaaactcgggagtgggggaaaacacccaaagccccaggcgccttggacatgaggccaggcagttcaaacccctcaatcgagcctctaaatctttgagacgactcaagtgcttgagaatagtgtagccattggcggggctctcttgtgggttatttgtgataccagcttcttctgtgtatattctccagtagatgttggagaatccatcctgatgtgacgcgtcagcatggacgcgaatgtactgtaaatattacgatactcacaataagatgtatgttggtgtttgcgccgccagggaagtccataatttaacggtcgcggacagccccggaagcttttaaagatagaagaaattccgatggctgactctggaagtcatttccaatcgcaggttgcatggtctgtgggaaggagtgaaagcgcatagcagagagatcggaaagcagcgaatacattagctgattgataccatattgcgcgggacgaagtgatcaacaaagactaaaaaggtctggcaaaacactgtctctcaaattaaatcagcgcaccaaatgaagcagcaaatctttcaaccacaaggcttatcgcatgaagccaacagaaagttgagatgcgtaattccgggggacgttcgccagggacactcgggccaatcaccaggcccatgtatcacgtgattgctatcagtggcttttatcgcagtttttttttttatcttttgcaggtctgctttcgccgacaccgataggttgcaaacaagttgcagatcagctcaacataactggctcggccttccttacactagaatataccagcatgaagctgtctaacccgtccgaggtcccggtatataccatctcgggttccgacagtgctcgcccgcttcccgaatggcttgctagacggcgcaagcgcagcttgaaaaatgaccccgagtatgccaatcgagttgaattactgcaagactttgaatttgaggaagcaagtcattgtatccgagtcagtgaggatggagattgggtcatgagcacaggttcgtactaatccccatcttttcctgagagcgcatacctaacactattatttgcaggaacttacaagccacaaatccacacccactaccttccgcaattatctctctcatgggcgcgtcatactagttcgctcaacaccacgttcatcctactgtcctccgattacaccaagtccctccacctccagtctgatcgatctctcgagttccacactccctcgggctgtcactacactaccagacttccccgatatggacgtgaccttgtctacgaccgccagtcgactgaagtgcttgttcctgcagtcggtgttaatcaagatggcatgggagaggtataccgattgaacttggagttgggacgatacatgcggagttttgaggttgacgtcggaggtgacgattttacatccactggtggcggaactctccaaggtggaatcaacacgggagcggtcaacactggtgctattgcggagcagagccacaatttgttggccttcggaacttcattgggaacagttgagctatgggatcctagagccaagggacgtgcaggtgtgctgtctacacccacacaacttggactacacgatgggcgatcagagatcacagctctagatttcaatcgctccggaatgagcctcggaaccggctcgtctaatggtctaattcacctctacgacttgcgttcacccgttcccttccaggtcaaggaccaaggatacgggttccctattcacactctccaattcctcgagccgtcatctgcaacacaagctgcgacaatcgaaccgaaattgctttcatccgataagcgcatcatcaaactctgggacatcgaagatcaaaaaccttggacttctgttgaaccggctgtggatatcaactctgttgcttggtgcaaggatagcggcatgctcctcacagccaacgaaggccgacagcaacactcattcttcattccgcagcttggccccgcgccaaaatggtgctcattcttggacaacctggttgaagaaatggccgaggatccaaatgaccccagcgcattcaagtctgctcaatctggttctgtctggcccggtttcacgcttgtgcccagtgaagaggtcgccaaatgggacgccaagctcatcaaggcaggcggagatcccattgatttggcagcttacatgcagtcaggaaagatggtaccttactctaagggttatcaagtgtcgaactttgtttataactctattacttcgttgttccccgacacagaaaaccctagagcgaagaaggtggctgagattatgaacaaggagcgggagagccgcatccgcggcaagaagaaggttgctgtcaaggtgaacaggagactggccgagaggatgttgaacgcggaggagaagagggagcgcaagcatgccaaacgtctattggaaggctcgggcgaccaggaaatggtcgatgctgctgcaactggcgaggacaaggtgttgggtggtggccgtttcgcccagctgttcgaggaccaagatttcgctgtcgacgagacttcacgcgaattccagttgctgaaccccagtacggttccccaggccgctgccccatcagcttcgagaaaggagcgtggcttgacggcagtcgagcaagaagccatcgacgaagtgcctggctcaagctccgactccgattccgacaacgaagcggaaaagcccgtgaaggcagcagtctccaaaaagatttcttctgcagactacaagcggacgaagcggcctccgcctcgtatgcaagtatcttcctcgaatcaagccaattccacccgagaccgctcctttggctctcgtgcacagaatatgaagtcgaaacaaaagcctgcacgacgggttggtgtagtcggcgagcaagagatgagcttcaacccggccgggaagccgaagcgcgctgcccccgaagtgcgctacgacaagaccgacacatcgttccgagccaaggaacgccgcagtgcttcgggcaacactttccgcaagatataatatgtcttgccattattggtctttttttatgccatttccttgacaccatacaatcttgtccagccaggttttctcgcctcaggtctacgaatcatgctcctagcttctttgcctcccacttattggcaattaaaggcttacttgctggcgcagctgtccgcttctggctgaactactgccgaacactaggactgagctcattgacaacctttattgcttccatgcaattaggcgttgtgcgacgtgctgctgtgttgatccccgggacgcatttctttgaacctacggcaactttaacaataccctattttatttgcacactgcctcaccgtcatagacggctttggtgtgacgcccgagaagaaaaagctctggcacatatcttcgaacgaccactttgtatctaatgtctcaaaagcgatgccaaaacaatcttgtatattcagctgtctttgtcactttgtttttcgtaataccctgagtaccaacgtgattgtggtagagaacagtatatctctcatggacaactatctcctttgaggaggtgggttcgagtgcatattgaccctcctacaataagtttcataattcacaacttacaatttagatactttccttgtgaatatttagaattggtactttagttacaactgtttgttatggactggaggggcaatacccacataccagcaatacagattgactacgtactttagaaattggaccaatgaacaatgcaatggtaaaagtttccaaccctatatcatgaggtgtttatctcgacactctgtccatgataaaatcgctggaggatgtcgtgatttatgttattttatagatcgttgcctgaggcgacgatgaagtaatcgaatattagcactaagcctaaaagggcattcgtgcaacgtcgaccctgccatctaatcgcgagcccccaagcccattgtttttccataaattcctggtttgggcgtggtgcttgttttctgttctcgtcttttggggttgtgccagtttgcctgctccgcttgagccacgctcgtttctcaacagaagagccgattgacagcaccgtccagcccctctaccaacaattcggggtgcagtagctcctcgcagggcaagccgacttcaacgtgtgccgatctgcttccaatgtcctgaccccatcataggatctgactattgcactataaacagtcaacggcactgtctttcacctgggggatcagcctactgtggtctccgagcagctcacacgtggaggctagagctataggtctatggcggagaacaagcgccaggtttcagtaaaggcctctgcgcagaaacaatctggtaacgcagcaggcccagggatggcgacacccatcgtggccttggaggcagcgctgagcggggcgatcggtgcccggtgagtcttatctgccaacgatggtgtctacaaagtcgcagcgctgacctattccgttctcgcgttcctagagtgcgtatttctacatcgcagccgaatcaatccactttcgaaggtacactgttcacggcatgcccgatcaccaacctcgtggccatcaacacggcccccgcacccaaccctggtgacgccaaacaggcgcagaacggcgactaccacgtgatccccatctcgcgcatccagcacttccagctcctcgctctggctccgccctcgaattccagctcgtcctcgttcaccgacgcacaacccacgattcaggcactcgacacccgtgcgctcaaggcccgcgagtccaaggccatcggtgaagcgcttgaccgtgaggcgcgtcgtggtaagggcgtcactactcaggcccaggacctatttgatgctttcagccgcactatgccggcgcgatggaacggccacagcatcatcgtcgccgatgctgtgacaattgctgctccttaccgcgttgatgattgccgttcgattgcggagggcgatacggctgctcttaatcgagtgcgcaaagtggtaggttatctaatatactcagtcatcaatcgcaaaacaaatcgagttaacactgtggaatatagctcgagatggagcgcaagaagatcgagcttcgcaatgccagcgctactatcggttcgactagcaccttctctcgccaccccagtgtccccaacgaccagcgcaaaggtggctaatgtgctcaatcacagaaataccagagacgcagtcctatgaaattgtagataggtctgacgtcgattcgagcgtcttggtggcgcctgatcagcaaagttaatggaaatacccaagcgaaaaacgacattgcaatgggatagagatgatttgaaagcggatccgacgggacactgcgcgttcttgaccacttgtgtctgggagaagatgccccccccttatcaagaaactatatgccgtggaccagcattgcgcgggctctgcttgccgtcgagttggaccgttgcattgctgccaaccgaattgccttgtgtcttgtttttgggcagtcggtgcgctcaagccaagaatacgagacaatccatagtaacctagtcaattgctacgacaacactttcttaggacaatgatattgcacccttcagccactgaaacttctgtaatgtgtcttatttcgacaactgctagcgacgacgaacttcaaatattggcaaacatgataatgaaatgaaaataaacccgctatgaagattgaaagctagatggttggtcgaaggctcgaaaagacgctcataaaaaatagagaagaagtatgtcatcaattgccgcgagatatttgcaagactttagtctagctctccgcaactggaactctcccaggaacaatctcacagacagtccccacaaacccttctaaacccgacatggacagcgtcccagaagcagagctagaaccaggcgcagacgctaccgtagccccagaatgggacggggcagaggccatggaaacaccaggcataacgagaacctgagagccaagttccacccattcaacagacgacaccagcgcaaaggtaatcttgacgtcttctttcagggcttctgcggaagaagcagctccgacaatggaagcagacgaaatgccagacactactttgctgatatctgttgccgagggacggcggcgaagtacatcacgtgcgccgccctcggtattgcttggtatcgtactgccgtttgatttctcactaggggaatgaggatcgccgtcaaagctgaagaattcaggctctgacggggaacccggttcggaagatatgtcctcgcctggcccagttaacgccatgcaaatgacacggacggtagctcggatattggcgatgtaggcaatggcgttaccgccaagcaagagtggaggtgaatttggagccgagaactcagtggaccggaaggtagcggtaaagcccgtgtgaaaggggagcgctagtaatgaggtaccattcgagtgcgagtgtgggtcgtggaagttcgagagaatcatgcccttgcggatccggccgaaacgcggtagacggccatcgtctgaaaccccgatgggttcgattccgatggttccgacttggtctctaattaggcggcggacaggaagccggaggtctcttacgctgacaacgcggatacgctgccatcttgcttgggaatctttaccggacaaggaagtctgcgggaaggaggccgggaaatcacccggcgggccgggcccactgcgggacagtgacccttcgggtggttggggctcattgcctagatcgtttggaacgtccactaagatggggccaatgaccatttcgtcgccgatggaaatattcccgcgccggactaggccgcagagaaccatgccgcggttctcttggccgcccttctccgagtccagtgaatagactttggagggagggattgcaaacacttcatccacatcgaagatattagtggggctgtgggagggtattggcagccctttagggatgtggagagttctttgggagggtcgtgggggaatgggaagagagcggaggaaggcatgaagttttccaatgccagtgccatccacagcactggtaagcatgataggtacggtatatgcccattttccatcagccgccgcgcatactttctgtacttgggcgctgtccaacgtgctgacttgctgaaggtcaagtggtttgtcacctgcaggcgatgcaggtagcattgcaggttggcgcccagctgttttaagcgcagaaagaactcttccaaggctatcccgtagtccactgcgggaagcaacgtccaatttggtgatgacaatcaacacaggaacctccaactttaggcaaagctctagatatgacagacacgtatcaatttccgattgttcagttcctgtctgttcgctgccagatgtctcattgccacagttggctggaatgcataacatcacataatgtggagcccagctgataagccctcgcagggtagatttcaaatatcgaatagagcccggtagatcggacacaaaagccaaacgacctcccttcgaggcggcatgaatatcatcccaacccgcaacattaccggaagcatagttaatcacggttggtggcatctcacccgtgtacccaatcagttcttgggcgaccgaactggtgatgcccgatgatatttcatgtcgatgcttgagcaggcttaatctgcttttgcctcttccgttgtcaagcgcagacgaagtcaacgtacccagtaaggaagtctttcctgcggtgcttggacctgcgagagaaattcgaatctgctctgtatgggagtaatcctcattcatgactgactttctgccagattctgggtgtgcggcagatttcgtatcgttcttggacttggttggagagatattgtagaagtccaggtcgggactcaccagagcctcggcgacccaaagactttcagtgttgttcttggtttggttcccagtttcagatggcaagtcttcaacccattcacactccccaaccacaactcggcgaaggatctcaactttacacccaatactagcagccatagcccgtagattggtcacactctcgtccaactcatcctgcgtgaggcctacgaaagtaccatcatcgccgacaccgatctcatacaaagcaccttggctttcttcaagaccgggaagcaagcgggccggtttagagggcacacccaattccagggctgcctcgggaagaacaggcaccacaaggttagaggtagtggatgagtgaaaaggtgacgattgttgcaaacgccataatagctgggtagtcaacccttgtagtcgttgatggcggctctggctagacttggcttgcgtgtgtcttggggttggttccaagctcggagaggatggagtagacgtacttggcatgacgcggtaattgtgatggtacgaacccgctattacatgaccagtcgacattgagagatacgggcgcctggctcgaagcagaaggtgcaatttgtactcagtgggaccctcttgaggttcgggttccaatttggatattccatagttggataacaagtcagggtcgacgcctagtggactggtgctagaacgcgtgcggacagctaaaccccgactggcagatacattgatttggggagtcgatgatcccgaagttgaccacggggacgacacccgaggtgggtcaggatcataggtgaatatggatgccatagacacggttacgattcagactggtaacaaagatattggtaataagcaaagatatggagatagataaagcaattctaaaaagactcgagaaacataaggcattcttgcagcagaattgaatgatctgtgatgcaaaagtgctgtaactgactcacaaatggcacgggccgaagcatcacgtggcccatgtttgtcccgtatttacccagcgccaagaaattgtatgagaagttctatcaagacatcaagccttttctctcagagaattttttggcctccccaaatatacatgcataataagcaaatccagtcccgctatagccaagcgccttcgctttaacgccgaaatcaaaagtgtgcatatgctctactcagcagatgaatctctgcctgagcttttacacttgccctgcccaacatggatattgcgtgctgtcgtacgtgtaaataccgcaccgcatattgggcattcagccttagccaccactcctgacttttctcgctggtggcggagaagattgctgaatgttgagaactcacggccattgcagccatggtcccagcattgtggtcgggggcgcaagctggatactcctgctggacggtcagaatcagtagcggcggctgattctggtgaagagtacattggttcggggaccatcgattgtggctgagagctgatggaggtagggtgcgatctagtgtggtttccggtcagcatactctatgattcgggttcatcgtctcaactcacggcatgtccggtgtggcggggaagtagtaggcatgttggtttatcatataagcggaaggactacccctgcgttagctgccagatcattggatcttttatacttcgagcggttcatccgacatacgatgtcatgagaggctgttcggactgaggagtgacggaagcagattgagggtggaagggatgggggagaggtgaactaaaactggaaatgtcagtcttttcagaggccaggtaatcaatcggcttaccttcgaggttcactgtgacgggaaggtgcgagataagacgccggtaattggtgttcttgctgttggtacccatgcagaggcccatttgggtgattgggatagcccatcggatagcccgatgcagggtatgacggatgtgaagatagaaatggcgggctcgtctgttctggttgcgaaggttgataaggtcggtttgtccacgcatattctagaagtgtcagtagatcatcttttaaacaacgtctgggtgaacttcgtacggcgagtattttgctgcactgggccagcaaaataagagtctggtactactgacatggggtatgatggaatgccaaggctgttgagggatgccctagtcagcactgaatctggccctgggggccgtttttctcatggattagctcgacatactgtgaatcttctgtgccaatttcttctttagtcggagatttatcctcgatatagccctgcgctgtggactctgtaggtggatagttcgaatctagagtgtgaagcggactcgtgctggtattcagcgttgttgaatgatgcgcgggcagtgacagtgcaaatccttgtgttgactgcgagccacccggtgcatagatcgagttctgaatatgctgaatgggccagtgagactctggtccgggaacgctgtgtgaaaagtcgggagattccactgactggactagtggagacaaaagtccaacgttcgattgcgaagctgtgaatggtagatttgattgattcctgcgggaagagaatggatgctgtgagccagatccttcgggaaacattaggaactatataggtcgcagaccagtgagattgcaagtactgcggtagggggtgggaggggccaaggttgagtataaggggaaaggtgggactcgtaagaggaagtcgacgtacaggtttgaagttccgatccgattattccctggtggtaaatcaaaagcggttttttctgtgaggacttcaattgggggcacggaacgggcgcgatgaagtatttaaaagcgcatatccagcaacgggcgtttactagtgacccccgcaatcgtgttatgatctgaaaggtcccggttgggtagcgttgctggcccacacgtttagaaactaaacaccgacttctagatttcttgcgcgccactgatgcgcctcgatcagggccgggtctactaaaacataccctgacgtcccactacccgcttgttcaccgtctcaattgcatatatcagggccggtcattggctgtctgatccgtcggaagctcaatgagaaataaaataatgagaaaaaaaaaaagaaataaggaaaaaaagaaatcccaggatcttcaaatgaggtgggccgatgggaactatcacgagcagagtcggacttttaacccccacaaatcacgggtaaaacagaggatatgcgggaaaaggactcgggacagattgcaactggggccatcgtctggacagtcatgatcctagacaggggagatgactatcctggcctaggcattggattctagcccccattgtagcgaatgggggcggattgggggccatgacgttctcgatagtctagcgcgtgcctggatactccgagatcccaccttgccatggccatttcgaaaagaaaaggaattatgccaaatacgaaaagcgaaacgcaaaaagcgaaaacgcgaataacctgaagtcgccagttccaccccggcccgaggcttgtccccctatcagtcttggcccccacaaacgcaccgttgggaaaaataaaagaaaagactttacattgtttattaatgaggcctatctgggcgtatcacagggtggacggagactaatgcagtacggagtattctcttccaaaggggacaccctaaaaggtaccgtccccatctagcaagtcgttaaataccctaaacaaatccgatttcagccccagatagtcccattccagtaaagatcatatgtacagggcccgctctcggttccttgttagctccggaatacttccaaggtccgctgcactggtattataggtgttagatcgacacatatccggaacgttgggggtcctggctattataggcagccgtgtatcaaaatggaaaagccgtaagtaatggtggagcttgtcacagaaaacacggaggctactggtaatttgagggtcatgatatggtcttcgaggatggactctgattgagtccttccaaagctattcttacttcaaactggcatgcttgtcaaaaatccaatcgcccctaggatcaggcacggtcatgatcggctcactccacaggggatccgcacttgtatccgttggcttcaggacatgtgcgatttctactaatgcacggttgatcatttagtgcccgattacagagtatgaagtacaacatactaggaattaaggatgttctgaccgttttttaaaaagcgtcgggatctacaatgtatggcgatctttgggttcttaggcttgggatcaacactattaattgacttggccaggaacagcttatccagcccttcaatgcaaccttggaaccctggttctcattgatttggtttcttttgatgcatcctttgtgttttacattggatgggctcacctactttgaccaggttgtaatattcagtacggagtacgccttgctcagattcctgtagtatgtaggttataaatgccgcattgggctggtgctatcaaatggaacaatcggctattcctcccccattcaactggcataaatcgcaagtctgtcaaaggccaagagagaacagatttgaaatcaatcgctcgtagccattcattttgtgggttcaggatttgtctaaaaccaatatgcttcgctgtacatatcactctgcaggatgcaggtcaaaaaccaaggcatatcaggaaaaatacggaccgcaatcccattgatcccaccttgacacaccgctcacctgcatatcaacttcaaatgcacgaaagccgttagagctcatgggacctttccaggtaggagacaagttggagcttctggaaggtcacattgcctcctgggaaggatcaaagaaccaattctgcttgaatagcctagaaatcgaattcctcggtggaagattggtcttggctgagcatgtctcagacgatcggaaccagtatggtgaggataaaggctgtggatataatgcggtatctttatttcattatttcaataaacatacatagatggatgtccatcccagttgcttatcgtagcgataatgaaattcgcaacccgtggacctcgagatgggaaatccaaatcacgtgatgacctcacctcagatcttctctgggctcttggtccaacagcatcatcgtaaccaacgcgtttttatccccacgatctctagctatctgctagtgtctcacaacacatcaaactgagaccatagttagcttgcagcttcctgattcaccatgaagctcgtccggtatgtgattacctttattgtgcgcggcaagcagctcgacgcaccaagcaaccctcaaacccactcctgctgacatttaatgatccttctagctttttgatgaaatgtgccaatgagacggtgaccgttgagctaaagaatggtgagaaaccccggcgcaatccccgcaatccccaacctaaagtccccacgaatatgccaatatgcgaaatacgcgaacgaactgtgttgtctaacttaactcccgtatctaggcacaatccttcacggcaccattgtgtctgtctctcctcagatgaacaccactctccgggctgtcaagatgacccccaagggccgcgaccccgtttctctcgacaccatcaacatccgcggttccacaatccgctattacatcctccccgacagtcttcccctcgataccctcctcgttgacgacgcgcccaagccgaagaacaaggcgcgcaaggagacagaccgtggtcgcggtggtggccgtggtggaccacgaggccgtggaggacgcggaggtcccccccgcggtcgtggtcgcggacgtggattctagattttctgttttctatgagaaccatccggcgtttgtttctgtcttcgcaatcggtttgattttgcatcatatgggctacaatgtgttgttccttttttctactacccaggccaggggtcccgatatggatggtgggtgacatactgaaaaaattaagcaattttaccggggaatgttccccactctgaatttgcgcttctcaataccgtgtacctcaataccatgtgctcaggtgaacattagctatcaaaagtactgtggaatcacccgagagaaggatacatacgatctgtgactagatccaccttcccttcgtctcttatctctatgcacggttccgggccatgtggtgtgaaggcgctaagggaggctttggccaacatcaggccacagcaatatcgaaacagatatctaaaacgtcatgcgagtatgtgaacctaatatcgtaggcatgtccgactctcgaataggtctaggtttttctctaggtgtaattcttagtgtcttctagcgtgttccctttccgttaaactcaaagactcggacacgacggtcccataacgatatataacgcatccgagattggcaatgccgagaaggttatttaaagcaccgtggactattttattctttttctttttaaagttctcgcgttgagcacccacatttagtggtctcggaaaacccgctagagccaaaatcagcaagacggcgtcttcaatagcacattctgtcccaattacctagttactacctaattgtggcctctcggtgtaatactacctctactttgacgttttgatacgaggcttgctgaagaggcttgctgaagttacgggagttataccctataaagaacgaaggtttaaggcgtgaaaatatctcagtggaaccagaccaggggaataagctgcgagtgcgcggtttttttcaaaaaataacatgagacatgagtgtccgctcaatagccttcagccaatgctgcaaatttaatccgattaaggctggcaatatcttcccgtgcctcctgagctctccaaggtttggaacaaccgggtggctctgagaccgttgccaagatatagaatgcggtatttcaaaggataccggaacaagctcccgagccttttggatcaataaggtcaataaggatatcaccgtagtccctttcaagctagaggggccagactctgttgatccaacaggattgattgccacggtcgacttctcaccagctccgccaagcgtcttatacgcggtatgtggctgataaggaccttctatttcaggggttgggttcccgtgtgcggaccatcccgtgtacatcgctcaatgatcaatcaaagccatttcggttttgatttccgaaagccgacgtgaaaaggttcgggatttggaatctggtgaaaactggatcgacgaactataaagtgctgctaacgtatgttccagtgtgttctttcgtcttttctttgtatactccgtacgtatatacgactacgtagcattgcttggaattcggatattactttcctattttgtgattggaggagatcatttccaagcgcgtcagacgacgtgatatcccaaagatcatctatgcccaagccttcatttcccagttattccatacaaattcgggaaatgtttccaagacacatctttgatcttcgctagtatacatgtaacaccgttctgacccccttagcacgacagcgccgatctcaatgagtagccaaatcacccctgtacggagtacgttagagtgggtatcatagtgggcgtccttacggagtgctgttcgacgtccggctcggtcccggtttgttttacaaatgtgggggccggaaaaggggcattcagatcgtcgatctactctcgatctgtcatcgatctgaccacgcgctgttagaaaactcccatacgtgaagcggaaattcgcgtttcacaataagtgatggtgcaatgttgaggcctgagcaggcatggtgctatgggctatgggatcagacgatcgagcgatgtgacagccgcccacgtgggcacgtggagactcgttgaggctgtggagactaaatcactcattgattgtcagagttcgcgagtcgttccaaggtttattctcgaagcaaggcagtgggggctcaattggacaggcaaccaattacattgtcgatgttgcataagctaaattgcaactaatgggacgatagccatagccctaagtacaacctaaacgagtaggaccggatcagaaaaaagggtcgacggcccacatctatgatttgttcttcgtatctacagagtatgttgctggagatttggagaatctgttcagaataagcgaagatcagatgattgtatctaaagcatcggtctttgtcttgtagaaccgacacagtggagttatatataagctaacaaagtatataccacgacacctcatgtctccttatttgacatcaacggatatattatgttgagaaaaatagtataataaagttatctgcataagccttcctatgaaagccgatatatgcaatagcatgcacaacggcagaccagatctagtactctagccaacgtaccatttctttcattaatggttatgtacttggattcttgattctcggcccggtcatcattaagtacatacattctaaaacgacactccaaatgtccaaatgtctaaacgttaaaatggtacaatagaatcatgcaatgtatcatccgctaatcttgcactttgcccttccagctcagctaattctttcaatcgtggatgtaccacttgaacgccgtctttctcaaagaccggattggagtctaattcatggatcgcatacggcggagtaagcttcttggtttcagcaagttcggatcgttcctcttcgccatctttccatgggcgttttcatccacggatccaaaaaaccaatccccagaatagccaagataacacctaatgcaacaccaacgcccgtgcctgtttagcacctgttgaaagctccggaggtttctcttctgactcttgagtcactgccatcatcgttgtggttgttataactgctgaagtcgtggttgaaacaaaggacgtaattggggccgaagtaaggtcagtagacctccaacggagctcaacaccatatccgtaccaactatcgactcccgatgtgataggaatggtgagtagtgtagtaccggttacgtttatatgtttaaacgtctcgttcatatcgaccgtggcaccgaattcgcgaacctcgaaagtggcgaattggtccatacaacaggcgcgtgtagtgaatgtccagctacttggtctatagtagcgttatattagtatgtgtgtatttcattttcccaccgtcctcatctctagtaatgccaattgcttactgataaacagggcagcatgttcctatagtttcggtggcgctggtataatttacggccattgcccagccgctaggacaagcgatcctaggtgaatagtatgacgatggggaccagtttgatgggagacatttggcatctgcaggacctaagtttgcccacaatgatcttgtacctatgggtgaggcgtttaataaccagaaatccgtgagacattcaatagccagagtaaaggtcgtcgtcagtggaagatgcgaccgcgtcgtggttatcattgtgggaggagcagtcaaacaccaaagcttcggacgaggaagaagttggaagaggaataggataggcaaatcggggttgatgaaatgacaggttgtaaaagcaactagactactgtgtctacccgtgtccaagatgatatgcggtccatccgatacttacaagggggaaaatatatgacccggtgtagaggtatggggaatgaattaagtaaggtataagcaatgaaatggtcataaggaaaagccagagggtcatatttattattcctgctgggaagtcgttgaaacctgtcttcagaaaacaatgtagccagctagaacgagagccttgtggacgaaacgcgtttattgagagcaagccaacacccgaaaacatctagataggtagcatagtcaaagtaatatctaactagctttcgccatccagtctatgcgtagttgacagggcgtcaacgtatgcagtcaaaaccgactcactagaggtaccataaacatgccgaaaaattgctggaagatagagtctattggaacgatgttgtattagtcggtataatagtcattatactgagcatatcaaggcagacaactcaccaatacatcatccagagggaatgagttaagctggattgtctttaaaactcgaattacaatcctccgtcattgtaagataagtagccctggaggcctgtaacaagctgatcaaggtatttttctaagtgattcgtttcatctaattgtctctgctcgttcggcggtagaaataccattcaagaggtgatccccgacggttgcacgcagaaccaagtcagggatcttgtgagatttgagacaatcgaataatacaagggcgatgtttgctgtcattatatctttggcggtgaccttcctaccaatttacccagtagggcggtcatccacggtgtatgggaccttccttattgggacatctgtcgttcgttttttctttcattcctcctttttccttccctttctctcttcctcctctttttttttcgcttcgtcccttcaacctgttgtgggcttccattttcatcaaccttgcggaaatccattctctcatcatgtcaagcttcgataagttcctcaatcccgcattctgtgcgaataacacaagctcgccatgtcccaacaagacctcccaggctaatagtgcttgcggccgctgctacttggttgtggtaagtctccaacactttgatcttttcaaagctctgcaccatattctaatcaaaatcaaaacagtattgcggcaaagaatgccagaaagaacattggcccatacacaaagagaattgtaaggacgctctggggtatgagacatggaagccagactggcacagaggagatcgaaagccagagtttttgaagaatcgagacccatctgaacggaatttgaatgacggcaaaatatcgtggtggggaggcatgccagcattggacttgttgaaactggatagaaatgaaggccaggatgcaccccccaagatgagtgttcttctcacaggtaagagactgtctgaattccaacaactgctcttttgactaacacaattcctgatagcatcacacgatattcggaacgtagtcgagacaatcgctcgtctgccagatacctattcggggcaatgtgagatcgtgatgaatggcatccacgctgggattttctcgcagaatgttcttcttgttctgacagctttccattttccaccagagcacgctgccattatcatgattcacttatggtattcagctttgatacccgcgtctattatcaccgcagtccgaaaaaagctcctgccaaagattgagaaagtctgctctgaagctgcacaaaaacggtctcaaccgtttttcaagtgcgtctggaggaagaacaaagcatccttgcatgtggaacttgcgagagatgagtgggaaggtcttaaaggataccttcaggttcctgctgacttttctgctaccgaagccgcctgcaatcgacgagacgtcatgtttgctgacaatagaaaggatgaattccaaaggactctatacgcacagcctagatactggcgtgtctccactatgaagttccgcgatgatggaatcatgctgcctttcgggtgctcacgcaaggcatttgacactcctaacccgttagtctgcccgacctttcattgtacctgtcatgtcactaatacaattaggatgtttttccataccagtcgtaattgacctatgccagactctgcagatccgcgcaccagctgggacctcctggatgtatgcactggagcgtacactgcgaattatcctgcgaagaatgatctgtacggtatgctattcatctacctccgtaagactctcttgggtttctgtcgccaaatttcgaaacgagatgtaaaccttcgacttctttctatcgattcactaagtctaccgacatatttcaaccagctaggcgaacatccaagatttgacagaattgatgtaactcctcccctaccacccccacctccacctccgttttgaattctattatattcttgagacaatgctaatttgatatagacgtatgtggctgcagaaaccggcgtgcttgggatccacaccgtcctcagggtatttaccccaatgctgaagccgaagattcaaaatccaaaggccatgcttcttaccctctttatccgcgacattgaggatatgtggaccaaggactccctcgacaaggacgtcgctcgtgctgtgaaacacctccctcaacctgagtcagcggctagcaatgatgcagaccaggtgagaattaacagatcaagctctttcttctgcaacgtcagtaaaatgttcgatctttacaaaaaaacctttgaatttgacaaactcaccccaacatttggattgaagatgaggggcagcaccacaatcgtggcccactggccaatgcgacctggaaaacacgccgccacgacggtgtttgagattcttgagggatccggcgccactggctgtgaacgctacgtcgaatgggaatgggaatgattatttgcacaattgcaaaccaccaagcagtcaactgctgggtgtgtgtatgtatctccttattcttactgctcatgaatccacaaatggtatcatcgttattcaattatccattaatcatgagctatctcctctccatatcctcacaatgaccaatttctcccacccagcctgcatcccactcgaccccgccgtctcagcgtgccaactgccccagcaacggacgcgttccataacctcatcaggccgattctgcttacagagtaagacataagccacacctcgcacagacagcacaccagggatagcatcaagcagtctgtccgtagtttccataccatccgctccgcccgcatacgttaacgacaaaaaatacgagtcattatcgaacttggcagagcgagacatggcctctgaaacagcagggtcattctctgccgcagaaggcagacgcggtagatcctcagtcggaacatagggtggattgaagaggaggacatcaacgctgccagcgcgaagaggtgcacaaagatcggcagccaatgaagcgatgtaaactgattgagacggctgttgctctgcctgaatagctgtcgttgcggtcttctgcgttgcgatgcaagcattgcgattcacatcagtgcctagtgtgagaatatcgcgccggccgaagatctcttgagactgcgcggccgcgaatgccagcacaacgccagagcctgtgcctacttcgacaactagtggtgatgcctctttctttgggaatctttcagagagccattttgattcggatgcggatgacaatgtgtctaggaagaggtatgagtcctcggatggctcgtagatggtgtcaaaggacacatgtgaagtatctggtgtgggaagcatggtgcgtatgtttaataaagcccagtccaggtttatcgactcctctttggagatagtggggctatctcgaaattatatgcagaactcgcgatcttggcctgaggcaatcacaaatttcaggcaaagaatccacttaagtggaagatccaatgtgaagcaatacaataaaaagtatcagcaaatggcagagaaggaaatccaagactaaatcccgagacatcccgacgcgttgattcgttgattcgcctcgccgcctttgcctccaaaatccccggaaattatgtcattccttcaatcctcgatctaaaccctccaatctcctaaatcacctaccaaatattcaagatgcgcattgctcagcgtttattcatggccatgccggcctcgatcggctcgaagtccagcctcagcgaggcccttgccctcctcccgccgctacagctttaccggcgcattctccgcgtccatcgcaaactcgatcccgagatgcgcgtcttgggcgattcttatgtgaagaatgagttccgtgcgcatcggagtgtggagaacccattgcacattgtatgtttattcttgcccgagtttggcgtggttataccgaattgaagggaaggggaggcatagcggaagaggaagggcttgttgaggcagtcactgacattggcaatgatagatcgggttcttgaccgagtggcagctatatgcgcaaaagttggaaggtgattcatgggcaggagataagctggacaaggctaagttggataagatgagtggtatgttcttgactgttgttgaactctgtctaggtcggtcatgctaaacgttggttctcattgtagatcagcaacttggacagttactcgagcttatgcaggctctgaggaacgagggagagggagagggagagggtcaatgagttctctattgatcacatagcacccgaggctgacactaccaccccgagagttggtggctgaacttcaaaaattggctctgagctgcttcatagatctaaacagatcgagtgcagagtgcttgatctcggagcagccaggcgtgcatgatatggttatgctgggagatgcaggcatcttccatcccaccatcagcccatatgtatatactacgtgtaggaatagaagatacgaggtttgacttgatttgaagttttgacaattcaggtctgcacccggtcatatatacattatgtgctattgtttctatatgactatgtcgaggaatcctccaaggttatatagatgcggaacaaccccgagcacacgggatattgacaaggcgaccactatgcacaaaaattaattttagctttaaattcacctatcatctcttatcacttagcagggaaactgtcaatgaaaatcaatctagatactccaacatcagtggagaacgcgccctgttaatgacaagctgactcatgcaaagtcggctgccgatgccgatatcgagatggagaagagggtatatcaatcggaaaacccccttaaccacttgaaaattgcccaattgatcctctgtcacacctcgcccttatctccaagcccgtcccaacacacagatcccaaaaagccccccattcacccaaaatgccctccattctggaagacccctcgacccgcaaccccccaccaaaagcacacctagatgcagcgccgaccctaacagcgtggaaaactaccctccccaagtcctccgcgccgatgacggtctaccccatcacagggggaccgcaaaccgttccaaaggacctgatcaaattcctgcacgaggagttcactgcggaaatcctccgcggcgggacgtacccgatggagcaaccgatggcgctggatgagttcgccaactattggttcggaacgtttgtggccttggcgatcttggacgatgaaggggagggattaagggaggggagggactgggagagtgtttgtatgggaactttctatatcaaacccaactatcctggtatgtgtcatgttcggattcgaaccaacctcatagtaataaaagcactaactctaataggtcgctgctcccacatctgcaatggaggctttctcaccgctactgctgctcgccgaagaggcgtcggacaggctatgggcgaagcatacctggaatttgctccaagactggtacgacgtgcccccccggctttgcatttgatcacacgcatgacatgcatgactaactcttttggtaggggtacacatactcagtcttcaacctggtcttcgcaaataaccccggctctattcgtatctgggagaagctagggttcagcgttatcggacgggttcccaaggctgcgcggttggcgaacagcgaagaattggtggatgcattgattttcgggcgtgagctgggaaattcaaatggcaggtttcaattttagtttgaagcgtccgttaatgtttgcataaagaatcgccgtttcaagtatataggatcgtgttgttacgaatgatgaaaatactgcgatgaattatacatgacaataaacttgcctagaaagcaagtaatgtgatttcccgagcgaaaagcaaaactagataaaactacaaggaataatattcacagggaagagaagctaagtggtaatcaatgagactcaaaagataaaaccgcgaaatagatgacctcaacgctcagaccataccatgcaaacaatagggatatcacgcaaaacctgacttgtcaagatgatagctccgcttcacactgactgaacaccgatttgggaatagagatcgaaccgagaaggggtgtaatgcacaagtaaaaaaaacatagatagaacgtagatagaacaaggtcgtagaagtgtagatagaagtcggagggcagagaaagaagaacagaagcgatgagggaggcaaccaagttgccactagcgccaccgtggacgtgtatccaccagtttgggggcctgctctttctccgccgttcgcttgggaagcgggagtagactggttcgcctgttcctagaatggcccagcgatgtacctggtcgtgaggatttgcttgggctctccatcccacctggagctcccgacacacttcgactgaaagctgtgggagggcccgcgaagctctggcgactgcgaggtgtgtttgacatccctgattgtcgatagagccgagcgtacggctgtagatcgaaactcgaggactgctccggtgtgggagagcacccgctccttggactccgagaaccaaagcggctcgagacgcgactgactgatcgaagattgccggaaatgggagatgcggaagtctctcggaaagagctggagaatggaattgatgatgatggccgaggtgtgcgggcgagcggggcggatgacttccgcaatgtcgaattgtaaccagtattgctgtcgtccacctttgtactggcgttccagcgtgggcgattgggaattgtagatggcggcgctggtgtacgagaacgagcagccggggtcggtgtgaagtaacttgaggatctataggatgaagttggagacgtaaggcccgtcggttgggggattccggactgtcgaccggtgtaagtcgtggcttgcggcaagctggagtaacgacggtttgggggcatagtcgaacgggctgtggtacttccgaccgaacttccgcgacggcttgagccacccatgggcgttgaggcgcacttgtacccgttgctggtcatgacgactgacgacgccggcgagcttcctggggtgtcaatggcactgcctgcggctggactgtccatagtgaagatgctggagatcgagtctcgtagctggtggcccctggtaatgtgtacatcttcgagagatgtatccattaccttagcgctagccttgagagcatccgttcgggatgtcatgtcggatagtaggcgcaggatctcaccattgacagtcaatcggtcgttgacgcccttttgaatgatggaaaccacacgctcaatagcaggaacataatgcattttcttcgcctcatagttttcaatgagcttgctcaacgttgacgggttgtgcacctgcatgccggtttccagcccttcttgtagcttgccaatactgcgttcaaccgattgaaacatcttttgtgcctgggccccagcattgcggaaaaccagaatccacttgtcttcagccaactccttcaggagagcttcagcatcggtctcaagaactttatagctcttctccaagcgatttcgccggtcctcaatctcttcacacgcactcgggaaaattgtctcagcgcgtccctggaacatcgatagtcgcatgggcaggaactccaacgatgccttcaatggttgcatgcgtgcaaaaatagccatgaggttagagtggctcgtgtcatcctgcggtgttttaataacgggagtgtcagacgtcgaggtcaagagaggtccaatactcagacgattctgcgaatgtctgcggcccttcatcggggactcttccacaatagtctccagctcattgatatcaaggccaccactggtatcggtcgtatccatcaatgcctgatgtcgcttctcttccatctcaaatatcagggcactcaagttgtcaacttccacgcccacatcgcccagaacgttcgaccaaagctcttcccactccattgccagttcaacctgttctttcacgcctttcagctttttcttaatctgagtccagttttgcagaatgctctccatctggctcacgatagtgttcaagttatccacatccacattggcaatgtcatctcgaagttggacattctcaatagccctaacatacacatcgacgagggactcgaagcgcgtgattgctttatcgacttcatctagcccctcccggccaccagccgcagcccattccacgtcatcttcagaatccaagccgctcaggacatctgaggccttcttgatccaaatctgaatttgctctgcagcgccgttcaaggcccggactgcagacaaagccgtggaaatgttttcgatgcttgcctcgagcgaagctggctgtgggagggggatggaggttagctgcgagagctggttgctgaaagaggcacgggagaaagaatatattgagtcggcgcgctgcaaacccattgggttaaaatatgattgcgagttggacgaagagcgcgagtgggtggcgccgatgggaggcgagtctttgggagggggtttcggagcggactgctcttcagcggaccgttcctctcttcgtgcggtatcatcaacatatttttcgaaatcggtcctgtcatcttgaacgtcattgggacgtcgcgagttcggcattggggctgcgcgcggctgcgcgagaaccggctctgcgacagacatgggcgtgggtgggctgatgtgttccccgggctgagcagtcgccgaaactatggccggagtgggcagtttaggaccgtccacaactgcttcggatgactccgggttatctcttcgcgcgtctgcaatctcttgtaggatatcttggtggggaagctggaggtggttcgatgcgctccggttgaactcctcgttttctccaggtgatgtgttggcacgattccacgcctggcccttcctccttaccttgatcgacaggtcttggtggagattgtcaagctccttcaggtgctcttcgggtattcgaccgactgcattggcattccggttctgcgccgcggacttattactgctgtccagcagcttgacccgagccgcgagggcgggagaaagtcggcggaggatggatggtcggccggcgctagtcggctcagcagggacaggttcttcttcgttgttgctgcttcctaagctccacagggatgatttggacttcaggcgtcggagggtggaggtaccggagtcatttggagagacggagagcgcgggggtgagcgatgggggcgacgtaggtattgtagaggtgttggaaggatttgtcgcgaggtcggtcgcgaaaggtggactgtcggctgtggcatgcatggagacaggccctgggggaattgaaagagcaaaaagaccaaaggatgtggttcagacagggatacaaggaatgtttggtcttgctcggtgctcggtaacagggagtccctttttaacgggttaaggctggctttttggctgttcaaagagtcggagagaaatgctgctacatggcaacaattaatagaggttctaaatgtaaagtctcatgaagagtgagatactatcgggcagcaaccattgaaacgaatgaaaagagggataaggtggccagtatgcgctgtagaatggggtacctccagccccgtactactgactatggggcttgatgtacctcctcggtatgtaattcaaggggatcaacgaaatgagatcatttcacttttgttttattttcttcttgtgttctttgttttctttctttcaacggtttcagttgagtggtattcactatttctattaacacaccgggctgtatatatatcaatctcacctccttgccctatatacatatagtacaacctctctgtgcacgaggtttgtcgatcaaaaatgcattaaagaaagtttatatctgagtcattttcacaacttaacccttttccagccttttccaaccgtttatgccttctgcccaagaagagttaggcagggagagaagatatctataaaaagacattgataaaggcatctcaaaagactaccatcgagccaccttgacagagaccacaacgcggccgactaatcttgtaagaaattaatgccaaaggaagctagtcccttctttgtacattccgatcagcaatgagatatcccaatgcggactaagcactataacaagacagggataaatgttcaaagcttcaatctgatgatgcatgtacgcgtcaatggaatgcaacgtgagatactatacaattaatatacaataaatagaattagaaaggagaccaacgatcaagaaaaatcaaaatagcagaggcggaagagtcggcgacaattcaggggtatcgtatcaagtgcacataaagatatcaaagagaaaaggaaacaatcgagatgcaaacacgaatttccaacacttccaacgagccctcaaatcaacccagcactcgggggtcgaccagggttagcctcctgccaatcgcgcactagctcttcgcggacggttttacaccaagccaacaatgcagtatcgaactgctcccaagccgtagtgccactattctgtacaacacccataacatcaacatccagccggagctcccaccggagttctgcagcttttacccagaactggagattctcagtctgccggtacggcttttcaatgtctaggtggtaggccgtaatgtcgccaaatttgcgtttcgacttcttgatcgcaaggttgtgtaactgaaccagggcacggccgtcccggaacctatcaagaaacgcagtgggaagggagtcggcgggagtctcctcaaccggtgtccaggtcggtaaggagtcaccgccaggcaagaggctgcgcaggaaggactcctcgcgtgagcgctcccggcccgtccaatcgccagcagcccaatcccaattctgccgctcttgagcttcaaggtcttccagcttcttttcctggattagcatgacgcgcacagccgcgatccacccctgaatcttctcacgttcctcctcgcgcagaccgctggcaaaatgccgggcagaaaaccgcttcaaaacttccaggacgtccaaaagttccttgcggatgtcccgttcgctctttattgatgccaagcgctctgggtactcgtgggtggtatagtagattttggctgcgcggatggcatttgtaacatcgtcgaggatgcacataccctgcaactcctctttattcatcgggggcgcggcctgcccggattgatcgtcctcatttgggacatcgtccggagaaagactcgatctgaggattgggcggggaggaggctccatgccattttggattgcctcgatattagactctgccttatccagcgcgagcgtaagctgccggcgcaagaaaagcagacctggaggaggagggatgtggtgcgttttgatgctgtacgtgctgactgtaggcggcagcatcacctcggcgtcctcgtcctcaaattcaaattccccctccgtcaggtctgccatacctgacgggctcgcgaccagatcatcatccatgtgtcgttgattcggggtgatcaggactcgtggcacattatttctgttcttcttgttcttttcccactcgcgacttcttccgctcttcccgtccagtaagcccgtcctggcaaaatagtattgtaagtgggcgatactgccgaggctcatgacgctgtcgcggtggcgtgccgattccgagaacttggcacccaatgcacgggtatatccatggcgccgggatgatgttgatacagacgatctggcatctgcggaggtagcggaggaggtcgagcgggaggactcggaggaaaacgtgcggtctggggaggaatatgaggagatagctggcgttgccggaatagatggtgacggcgaggagtcgcgtatagacgctgccggtttagagtccatggaccgtcggggcgcatccatcttgattgaatttgaattgtcaccgggtcagaaggaatggatctgtcgcgtggagaccaatcactagaacgttcacagtgacggggtattctgcgggggtgacgatgtgacgttaacaatgagggctggacgatccctagacgagcaacggcttttatataaatctattaatgaaaggaccaaggtttaatgagacctgtaggatcgacggacgaaaaactgcttttgggccaaaagggggggcttcgactaaccggggctaaaaggggaagcgggtcaactgccatggagttgaaagagatgagtgttcctattttccaccgaaatgaaccaatgaggcccgtgacacccctttttgattatcgatcggaagttatgaagctatacggagcacggagtatagtaacatgatgctgtatacttccagggcctcgaacatccacgtgttcctgaattgcctggtaaggtttagcttgtgccccgcatcccatggttcgatgactggaaccttccaaggttcgaacattaaaacttccacgtggcgttacatgtctacattgtatactccgtacaacttcaagcccaatggaaaagagatgtatatgccattctatgataaataaccctttctaatcctctatatttgaaacgcctgtcaaaatgtgcgtttggaatgccttaatgcttcacagctctcggttcaacaaagatctccttgcggtcccaagcagctggcttgaggtcatgaatgtccttcgcacctctcggttcaggaccaaagatctccttgcgatcccaaccagctggcctgaggttatcaatgtccttcgtcgggtggattttgttcggatcggtgtactcaatctggtagggattgggatcgtaagtctgattgaggttggcgagggtgtgattaacctcgcggtgcttggcttcgtcggcgcggacaaacaacagcaggtccttcattttgcggtgaccctctggcatctgccagtatttaaccgagagatcgggtgcctcgagtttctcccacccgggaagcttgccgctctctagttcctcaagagcacgagtataagtaatgacagcctcctcctcaaggtatcccacaaatctgtggcaaatacggggggagatcacgtatgccaggaagaatccgttgaagaagacaccctgggctgcgataaccataaagcgcatgaaccagcctggtttgtccagttttaggaaggtaaggaggtgcatgcgttcattgtatgcttcttcaagtagggtttcaatcctagaacgaaggaagtgggttagtattgaggtgatatcgttttgaatcttgacttgggtagacataccatccattgtccctcttcatcttgcgaagactactgagatgacgcagcatgccgcccaccatgccggggacaccggccacactttccaagaaaataaaccgagttaaccatttttgctcggtcattctgaagaatttcggcaggttctcgccgggcttaggatgtctgtatcctgtcgctgtgtccataccccatcggaagacacgaactgttccaagggcaacccagtcggaccagtttgaagcttgtctgtgggctatgcgaatattttccatttgttcctcggagtatctggcatagagttagtgtctggctcagagagaggggctgccgatatacttacactggatgcacccaggctgtttgcacctgcttgacattaggagtcttgggtggtgggaagaagtccttgttgtttttctgaggtgttgacgagataggacgcttgggtgtgaggctgaacaccgctgtacgcttgttgattccacgtgcgggcttcaatgtctttgctgcaactcccgagtaggttcgtacaacaaggtggtactgcggcttcgccgcagccctcatgggagccctaactgagagagtattcatgatgtggccaacgagagcgagtttgaagtcaagtcaagattgagggtgataaatgtattgtaaatggtgaagatgattgagacgaagaaaagtgaaagaatataaggaagtttagggaatatacagatgtttaagataaagtctcggttgcacagatcaagtggacaccccctaatcttttaaggctttaaatatataacctaccaatcatcggaaggcgaatataaccagggatttgcaaaaaaagttaaagaaagcccctggaactgcttaggttatacccttgggatgatggcattccgtatagttcattgccgcaacacccagatattcccccattctgccattatcagatcacttattcctctagatcatatccctgttgatatacttcaaacaacaactgaatacatcagccttcccattatctctacgccatattccacgttatgaccaagactactcaaaacggtcatatccttgttctcgggagggaccggcccgggtgaacaccgatatatgactcagcccgccaggcgaaggcgatcccgagaaatagccggcgacaaagcccggagttattttgaggtcgttttctggttccgggatcctgaaaatatccattccctctatcttaccggcgactgcatgatcgattggctggtagccttgagaaaaggcgaatatccctgcccgtttcctgccgatcaaagcactggcacggagtctcggcatgaaagatctataataatagatcgatgcatatataaagagcctgtcaaatgtcttcatctgcaagtcaaggtccgcttaccttttgtcaaggctgtcattctccttccttatatccatcctctgccgatactccgtaccgagtactctccttcaatatggatatctctgcggagtaccaatgcatagattatgcgtaccggctttacctagtattataacaagctaggtgatatcatcgttcaaagtacatagttagatgagcattacaaataggttaatagctaatggttatgttttcccttttctattattatccaatctgctccctgaatcgctagtcgcctgtctccatattttcaaccttctacatttctttctcacattctgtgactttgcattcttagccttatcccaatgttttgcctgttgtctgccctgtcagtcactgctacactagctaagccattgggttccagctgttatggctagaagtttgtattctagaaacaatagtgccgcgcggtcaaagagaccccgaacactccggctagtattgacttattaatagcaagaatgtagatttcatcatgattaggtagcatcgtagctgtacggtcaataccaaggatgggtttcgaataatgatggagtagaagaatccacctggctctggcctccacttgtgttctgattattgtatcagagcgaaaagaacccaactcctagtcccttgcttcaaacatggaatctgctgtccgcatcacaacaaacccctcctcgtcatcacgcacatctagctcccgcttctccagcttcacaacaagagccctagagggacccttttggatgcgctggaggaatctctgcaccttttcgtcactgctctgggcctcgccctcgacctgataagatctggtaagccgtctatccggagacacgataagcagtacccacccttccgcaagtggtatttctgacccagccgttgagctcatcgagattagcacacttttgggtgaagtctctatagtacgcgataggtagccactggttaatcgagggactatgatgtcgtctgttaagatggacagtatttcctaccggaagccgacacctagggatccatgttagcgtcagaggatacggtggtgtttaaaggtcgacccaccttgaacggtgccgtggactttgaaagcaatctgaaatggatagcatatcagcaggggaaacctatagcttttgctttacttctagaaatatggctgaatgaatatgtagtagaggacatactcgagtttgtggcatgtgtgacattttgggatgaaatatggtatttggaagagttgggtagaagttgaagtgtatgaggtagaggttgatgtcaagcccgagtcttggcccccgcaaacttatcttaaccttaagggccaagccacgtcgatatcatttgtgcaagacgtcgcaatgctttgcattgaaactagatctgtgatatcaactgggagatgaatacttggaggttgtactcgatgtgatattggctggtgctgattggttccgcaaaaggatctacaacattacaatagacagtacactgaacatttcctcagttatttcgatatgcaagggaaatctattttattttgattttagactgggattttactccgtgtcgagataggatatagatgaggccacctacgtggcggtgcttcgggcccctgagtaaacactggaatctcaatgttccgagttcaacttctccaaacctgcgccggccatgccactgatataaaatgccctccattttcgcctggcttcggcgggtctattcgctagatacccttgacactcgtttcacctcctccgcaacccctgccaacaccaacacacgaccttccaccaaggatacccgcaatgcaatcgcccagggcgcgtcaccttcactttggcgcacaccagaattctttgtctactacttgttctttatcactcttgttccattgatgttcaagaccgtcatcgatgtctcgaaaggtgagtgtaggccggagaaaatgctgggcctacaaattctgacagcggatcaacgtcacagaaagccacccagcctactccacatactctcaccttttatcacccggttggatccctggccgtcaggtggtaagtatgcaacactcggcgttcagctattcatatctatgaggccagtcccgactgacattattgctctggccttaggacaactccgatgtgcaatatgaaagctttcgcgacaacattcctgcacttctactactcctaatcgctcatcctttggctcgccgcgtttatcagttacacatcaaccgctcgaatgttggaacaaaacaatcgagctattccgtggtcagtgcgggcgaggcgcaacttgaacagcgaatgcgcttcgacttttggttcggactgttcttcatagtagggcttcatggagtatctgctttcaaagtattgttgattctgtatatcaacttccgaattggcaaggatgttccgcgtgcctacctgcctaccgtcacatgggtcttcaacctcggcatcttgtttgccaacgaactaagcggtggctactcccttgagcggatagcaaaggtgttctctctggggtctgggacgtcagaagatggagccaccgcgctagtccaatgggctcaaactctcgatcatctagggggcttgatgccgcgatgggaggtacttttcaaggtcacagtgttgcgcctcatcagtttcaacatggataattactggagtgtagactaccctgcaggaagtctaattgaagtaggtcttccgaagccatcaaccccatgtgacaatcaaactgaccgaattcaacaagaagaagcaactagaccctgcgaccctctctgaccgtgaccgggttaagatccctgcagaaccagctgcttttacattccgcaactacattgcctatgtgctctactcacctttgtatctggcgggtccgatcttgacattcaatgactacgtatctcaacagcgatatacatcggcgtcgctcacacgaactcgcatcgtgatgtacgccgtccgctttggcctcaccgtgctctgcatggagctcatcctccactatatctatgcagtagcaatctccaaagctaacccagactggtctgtcttcaccccggggcaactgagtatgcttgccttcttcaacctgcacataatctggctgaaactcctcatcccatggcgattcttccgtctttgggctcttgtagacgggattgacccaccagaaaacatggttcgctgcatgtccaacaactactccgccttggccttttggcgtggctggcaccgctcctacaaccgctggatcgtccgctacatctacatcccactgggcggcggcggtgatggccggcggtcacccggggcgcccaaaccggcttcatctcgacagtccaacttcatgggcaagttcctacaaattcgcaacttcctgctggtctttaccttcgtcgccttatggcacgatatcaacctccgcttgctcatgtggggctggctcgttactctcttcgttctaccagaagttttaggcggcatgtttttcccggcctaccgctggcgctctcatcccactgcgtaccgtgtcatctgtggcattggctccgttgggaacgtccttatgatgatgatagcaaacttggtcggctttgcattgggtctggatggactaaaggatctgcttgccagcctaacaggctcatactctggcttggcgtatatgatttcctgctgcgtcgtacttttcgtcggcgtgcaggttatgtttgaggttcgcgaaggcgagcttcgcgcgggcatcaacctgaaatgctgagcttttaaacagcgtttttaaacatattttagaaattgtttgtggctagaacctggctataatgagatgaatatatatcaagtcttgacttgtatgtcacattaagattcatattgactattgtacagtttttggtatcaattcataaagtcatcagtaggacagggctaggccaagctccttcccaatactagtagggtttcgtatagtaagtacaagtacaccccctaaaagaaagctccacacctcgaatcctcatggaccttgtagcaatccagactacaagttctcaaatgacaacttttgcaccggatcttcccccaatacccacacatacaacaaaaatgccgcccgggccgccccgacgctggcggcttcgctcgcgacgcactataagaaagcggcggctccgccagtagccgttgcatcagccgatcaggaggcacagggggtgcatacgagcgcagcaggggatcattatcgtattgcgacttgattagtttcggtttccgcggcggtttatcgtcggcatccggctcagcgtcggcggtctcctgcatgggcgccgacacaccggctgttgtgtccgccatggccgccgccggacgcttggcacccgcagtgctagccggcgtcgcgctgcggcgcaaagtagcagcagctttgcctcccttggcggcgatgctgttccgtgcctgcgcgacaacgcttgcgcctcctgcgccctgcatgcctcctatccccccgctgcctgaggctattgctgcttcttcgtcgtcgaggtggttccggaaggtcttttgggactgcaggatgcgtcgcacgttcgaggtggtctttgctcgcgtgccgcgggcgccagcttctcgggcttgtttcactggtgctgggatggcgacgtcgcgctggttctcgcggtctagttcggcgatgtgacgtgcgatcgcgtttgcttgtcgagaggagatgtcgccgcccttgccggcgtcgcggatgccgcgtttgcggcctagggttggggccatcgcttgtgtcgggtcgaagcccctggttggggcgtaagaccagcctggtgtggccgttgatgtgtctgagacgagttcgacgcggaacattttgggatttggtgtgttgggaggtttggtgatgatgcggaagtggatgatggccgggggaatttgttggagatgaataaatgtttgtcttgtttgcaggggagtttggtatgtactccgcacaggacgaaagatttagttgatcgattgttgggaaaggaaatgctaatattttagaacctgggactaatttcatgcaaaaagaacaaagaaataaagaaaaagctatcccctggccatcgaaaagcgatagtggtcatgtccagggttgacaagcttcatacacagaaataaaacgcacccagcccatcccagtcataataaatacacagatgaaacatactggtcaagtttttatttctttttgtgcagcgtatcaaccctggactccagttctgtaatgtatgtctggagcttcatggtagccttttgaagtgcctataaagagaacaatcagttctgcaaagacaaacatcgaagagaaaatgggggccctctcaaagactcagcagggagctatagacgtaccgcaatatcttcagacaacgtctcattggcgagacggtactctgttaggatgtaatagtacaccaacgcgccggcggcgacagatccagtcaggaacccgaacacactagtggatattagcaaaaatatcttggacgctgtgaccaattgacgctgaatgtcattgaaaataggagaatttcccataccctcctcggaaagctccaacaggcttgcttgccggtagcgcggtggactcccagcgggcaccggacgatgagaaggaccggatgccgacgcgtccgcgcaaagggagaaagatctttgtgccaataggcatattggcaatattattttaaccgtagaggggagatttatggattgttcggtggaagatggtggcaagtggagtttgttagaagtgacgttgatgaattgcggaggtccgggcggctcggaacttgcctaagggggtttgtatacaaacagggagactacagtcacacaaaatatatgaaatcattcgaatgcgatatctcgtaggaaagctaaagtacataacgtattgcttcccttaattggccattgtgttctcgttgaagagatccgccaaaagatcatttcggcatactatcgaatctacgctgcccataccgtacgtactctcaaacacataaatactcaatcgagcgaaaaacggtcgcaggaccctctcgacaatatcgtccttggctgtctctcggatccagtctgagatgagccatggccgcttaagaccactgcgagcttggggctcgatgctctccgtggggagagtgggtgagcctgcaccgcgtggaccaaaagtctgagaaacttcatctgccagagcgatgggctcccagcggtcgggtggatagaccgcatcaatcgtgtcagttacgaaaagccattcaaggagctggaagtcgtctggggcgaggacaagcagtatgtcgagcagcttggacgcttgaagcagtgagtaagggttgtagacctccggctgagagccatggggtactgctgagatggcttcttgcagttcagtgttgatcaggggccagaatggcgccatgggggcggcagaggtcttgagcgcgactgctcgaagaaccataaatatttccgcccgagtggcggaagatggcgacgaggagctggttgccgcaagaagatcttccagcttctgaagcaacgccggcaattcaccgacaaagtaatcatcgctggcagaaagcaggagtagcgcgattcgccggaggttgagctgcgctttgcgatcggcttccaatcgggccgcagaggctcctacgccgaacatgatgcccgctgagcttggtggtggaaggcggacaagaagttcagatagccgttccttgtcagcgagaacccactggcgcagcaggtccatccagctgttcttcaccaaatccaattgcaatccaaagaatcggacatcattgaacgcgtcggatatgtccttcttccacattttcgccgctgctggtacttttgccatttgctgtagaagaatcatgacattacggttgagattgttagggaagagacgtgaccgaatgagagggcccactacattagtcgagacactagtaatggcggtattgacccgatctgaatcacccagggtcgtgataaacgacggcatagagaccgctagaatgctcagcatgtcatcgggtccagtatgagagaccgaggtacggtcataatccaccgaagatgttgccataggcccagtgtcttggttgaggcctagaggcttgctagtaaaaactgcggtaaggagtcgtaggagaacatcctgcgttataattgttagtgattatgataaaatcagtagtggatacacatactccaagttcttttcgcatacggcggtcttcgccaaaagtcgtattctccaatttcacccccaaaatagccgcgaattcaatcaaacgtggaagaatctgccggtgcgggaatggattgctaagaacatcgcgcaagaaagttgtgcagtccgtccaaatctcgtcaaggacatcatcgtccagtgagcgggcataagtaaccaaaaagctagcaagctcggactcagagagattggatgttaacgaagacttccggctaggatccaaggcattaggattagtgcgagtgtaaattgcattgaaaatggccgggatggtgatctttgggcttgatccgtcgagtgtatggaggagattgaagataagtgacgctgtctccgtgtcagacttggtccacatttccaccaatgtctcaagacattcaagtgcctccgcagtaaagaagtgctccaagattcgtcgtgagcggtttctcattcgcaacgaggtatattgaaatgaggccaaagattcaaaatctggtggagagccactgtgatcgcctgcgccccacgcccaaatagagaagcagaggcgaacggcgtcttggaaacagagaagaacagtcaggcggtcgttggcggtatttgggcgaccttgcccgctttccgagttgaataccccagacaccatatttccgaaaaagccctgcggttggtcagggctcttgactgttggaacgttggactcttcctcgatgagacgttcgtgtgcatttgcaatacaggtctcgaggccagtcagaagagcaattgtgacatgctcggaacggtcctgcggccaatcctctgtttgctggaaggacagctgaagtctgccatatgatgctcgaatttccctgcagaaacattccacgagcatcaataggatctggaatatagtacctgagtatagagggagcacctcgcagagcagcactatccacttgtctacaatttctcgggatttaggtgagctaattccctttaaaagacaatccagaagccgctctggcggctgcggtagctgaggtagcgatggtctcctgtctgccttgtcgctggtgaaagacaagatcgaaggacttgtcagacggtcacgagagctagctcgtaggtgttttggccgaggtggcgggggtggtagatatgcttgtgcgaatcgcaccttcagtgcagcaaggagtgtatcgattagtgcaccctgcaccacaatactggacccctcggaggagataagaaggcgctccaccaagaaatcgtcaatgccagactccactaattcctcggctcggggcccaagaagaagttgccgcatgagctggagtgcgtccttatgtagtcgttctccatctagattcaattccgtaggtgctggtgatagtgtgctgacgattcgaagagatgcttcaaatatggcggaatggaggcttttgaagtctgcattttctatccaagaaatcatattagcaacaattgtttcgtgagaagataattacgcaccttcagctttggacgcttcaaggcgcttctcattgcccagcacatgagtaagaagtgcgatccatccgttgtgcgaaagcgcagagatgatatttgaagctgtctgtaacaaataggcacattccttgtagtcatcaggggaaattgagtaggtgtctgtctttttctcgctagtttcatcagattcagaaagctcatcaagatttgagatgaccacatggaaaaccctagtaaactattagttatggatcacgcgttgggatgaaaagccgtcttacttgtggatagatggcaagtcctgcagccatagttgcacgctttgcgaactatcgctcgactcttgggagagaagatcaaggacaataaaaagtgggcgttcaagcatagaacattgataagagaacaaggtccctccaacatcaagcacttgctttggcggctgctcatgtgtgttgtgatgactgtgattccataagacatagaatcgctcagcttgttgctctgacgaaaggtggcgggatgctgcggttgacatattgagcattaaagctgtcagcgacgcctcgacaaggtggtcaatccaagaaattgaatgcaggagccataagcagcgaacggcttctacgtgaaactttggacttaggggagataagtaccaccaaagctggttgacaagaggggtaatcagatcgcaagcatcctcatagctgacatagaagccgggggtctgaatgaaaaacaaacttgtcactgtcgaagcgatggtcgatatgacagagaaggaggcggttgttggcttgtccttccctgaacctagtcgctgagagagcgcttcatacagtttgcgatctcgtagaacgcgggactttggaagcttcttgagcaaagtcacaagaatatcgagtggctcgtgaacagataggccgccatctcggcttcttagcgccgcgatagccagttcgtgagcctctcggataatcatttcgccaagattcttaggagcatatggaagaggtggaagctccaagctatttttactttgttcatagaaactgtggacagttttcaatatatcagtaccacggccctttgtgtcgttgacagcagtcttttcagagcccgcctttctcgagaacgcccgctctgtgagtaaaccagtcaacgatttgagaactttgttcaatgcagcggtcacggcctgtttggcagtgctttccttggatgagatctctctcatcttgacgagcactgacaatgccagcagaggtacatggatctgaaccatgtcctcctcgcggacattgaaattctcaataataaactgcgcgagatccaagtcacgcaacacttggtcgctatcaatgtctacatcagaacaccggtaatcaaccaagcccagaagctcggagaatatcacaccactttcaacgccatcaaaaaaggcgctcgcactgcggaaaacctcttcgaagtggttctcaggggctgtggattcaaatgcctgaacactgcgtacagtgggcaagaaaactgcagggacaatatatccaccaatttcccaacgatccattaacgacagagctatgcgaaagggcttggttctatcggatggaataatcggttcatgtttgatcatatccagtagaccagtgactaagggttgtaagcctacccggctgaagtattgtgattgtgtgagctccttgccatcaacggacgcagatcgagcggtttccattgataatttccgatcatccatcgaagaactatcgtttggggaatctggtcccaagaaccatgcccagagtcggcggttcaggctcatgtcccgccgagtgaccacacccaccgcagcaataaccaatgttcgaagatcagtagccgcaattttgctttgcaaaatcggagaactgagtggaaggtgggtgacaagaagatcaaggaagttacgctggacaaggagctggtcatcagatagacctgatgcaaaacatcgaatcaagaggccaggttccggtagaatgacagagtcggctgcggccagtatctcaggtgggatgttctgcggatcgttcccaccagccgtgcttggccgacggtctgcgatacctagctttgggaggtagcggttcaaataggcaagaacaccaagccgtcgactagggttcgtgatagatgcgagaaagaggcattgccagaaatactgtccagatgccccggcctcagacgtcctttgtgtttcaagttgtccagcagcatctcgcagtttattcattgtgcgtagtgttggctcaaaatcttcacttgtctcctcttcaaggcctggaagtagggctagaatgattgctttcaaggcgggacggatggcccatggttctagatcaacgatatatccctctaccaaagacagaaacaatgggcggacagtaagagatgcgaaagtcaatgttggcgcaaggccggggagatacaaaggcaggtcgtgcgataagccctcgagctggttgtaaacagatgcatcagtaagcatactgtgagcctttcatgtggccacccatacctttatcaatccaaatatgtacgtgtagacttcgagggtcttttggtgcacgcctgacggcaacgatgggttcaagcactgggcgagtcgcttcgacaccaacactttatgaggaacgatgggctgatcaggcggatggctttggagtgcctaatagttcattatcagcgatgccaaacatcgctactaattcgaggaagctcacctttaacaggcgaccgagaaatgatatatagtcggcccattcttggagagcgttgtcgaagagtgaaagcgctctttcaacactagatgcatatcggcgatagttcttgtcttttttgagggaccctacaagcaccaagtaggatcagacacagtcctctcgtgcagttcctgaggtgggcgcataccttccttgccttgtagacgggagcgtgtcaaggagctctcggagctcgcgggggaattcgacctcggaaaggcattgggatcaagactcatggtgccaatgatggacgtaaaattgttgtgaaatttttgaactaccctccgtcatatttaggacatcgaggatgaccctgtgggaaagggggttggcggttgaatgttgaccagaggccaacgcaggcggccacgttcagttgttttgttccgccttgggatagctccgacttcgccgacgtcaatgcccagcaactatcaaatcggcaaacacaactaatcaagacgtgaaatatttgagctaaacaatgtgcatttaattccctgaagacccgcgacgagcgaccgcgtcaaaaagcgcatgcccgcagcggggatgaatacacagcaagacgcaaagaccgagggccaacagcctatcgagacccccaagcagccgtatctttccaagccctcagtcccagattatgatgagggtaatgagagctcagagggagaacggccacctttacctccgcgaccaaatacgttgagtctattgaacgatgaaacgggctcccggtcagctctacaggcagaggcaacgacggctatctcgcgaaccgatatcgagacacaaccaccggaagctcctggtagcacttactccacactagctgttcgtggtctggcccagggtccaaaagccagggcgagcctcagccagttggcgagcccgcggagcagcgaagctggtgactctgcgagtatcagaagctcagtcccaaatggtgattccggagatgttgaaacgctgtttatggactttgctgctacggagcctggtagtcaaaggggcgctacaggtctacttgacttccctgaattcgcggccgacgatatagacgatgatggaattctgagcgaatttgaagcagttggcgaacttaatgaggaaggtgataacgaaggtttgggtcaataataaatcgtctcttgtttcataatgctaacgcatgtcagagctgctcctccaacggtggaaagcgaagcgcaagcactatgtgatcctatccgccgctgggaagccgatttggaccaggcatggtgacagcggcctgatttccggatatgtcggggttattcagaccattatttcgttttatgaggattcaaatgatcatctgcgaggcttttccgctggtgataccaggtttgttgtattgacacgggggtctttataccttgttgcaatcagccgtatgatggaaagcgacaatcagcttcggcttcaactggaagcattgtatatgcagatattatctacattaaccctgccttctttaacccacctcttttctatgcggccctctactgatctatcgcggcccttacagggttcggagtcccttctctcatctctggcagacagtttcacgcgaggatctccatcgacgctactatcggctctggagtgtctgaaaatccgcaaacaacaccggcaagccatcaacaatgcacttctgaaaaccaaagctagtactcttctatatggcttgcttgtggccggcggacggctcgtcagtgttatccgacctaagaagcactccttacatccaggcgatctacagctcttattcaacatggtttttgaggccgacggagttaaagccggcggtggagaaagttggattcccgtctgtttgcctggcttcaacagcagcggttatctctacatgtatgtgagctttcttgacattcgggacgatatcgaaactagtgcagagatcaccaaagatgagtctgttgccattgttcttatcagtcccgacaaagaggctttctttgaaatgcaaggaatgcgtgatgctcttgtggaggtgagattacataattccacgcaatcgaatatggtatgcatgtactaatgatgcaatagcaaatggagagaaacggcagtctgaaggagatcaaaacggcaattgataatggccgacccgcaaccactgatatagttcctggaactgtgctacatcatttcttatacaaatcgcgtgcaaacgtacaattcactatgtcatcttatgtcccggaatttgcttcggtgactcgacggcgaaggtgagcaacatcccctctgctgttcacgaatgcttgcaatattaaatcattctgactgtgcctatagattgatgtcgatgtacaacaacttgcacgcgagcattcacgccaagaatacccatgtcaaagtacaccactgtgtttcgcggtcagccacttcgttcggatgggtaacccctgtattcgaattctattgtatcgccgagccgaacactaatcgaaatgcacttgcccaaagcgctagcaagattgctcagtgggtgcagcgtgaggaagagaggctattcatcattggcggtgcggtatgtactttgtctctgtggttattatggcacgagtgacaacactgatcatatgaaacaggttttctgatatcttccctacgtttgcactaagtcataaaacacttttgtggtcgccgggacacgaaaatcaaatcatgcctgaaagagagagggtcacatgagcccaaataataacactggatccgaactccgccagtcaatggacggagttctctgtatatactctctcgtgatttaatatacccaatactacgtccgccaaccttacatatatattgtttatggtagtatcctagtctacttttatatctcaagacctcttcgtagaatttactggtagatattctcggttcatcacgttgcattgctagaaaatccataatacgtagggaaaaaaaaataaaagaccacacatgtggactaatcgattgtgtcctctctcaagttgaagagctgacgcataacctcacccgacctgctgcgcagcgcatcgtgatacatggtgttggttataaactgcttggagttcttgatcttggcagcagtggctgtggccaggtcaaagtgaacatacatgtcgtcgatgtaggttgcagcatagactggcaccttgtttttggccagttgagcctcgtcatataggtccggccattcgtctgttgtagccaggatttcggctgcttctttgagctttgagagttctgagtaagactcgaacatatctttgaagacctggaaggtgggaaatggtgttagatctttctgttcaaacaattctgggttaggttgggttgggctatttaccatctcgccggtgaagtagatctcggacaacgagtcattgatctggaattgcgggttgctagcgcgcagcctgtctgcagcccagagcgacggctttctatatttttgttagacacacatatgccaaaagcagacggcaagattttctttacccttggcagtagattgattcatgcagaatggcataaatgatatttttgtccataccgccattactgtcaatcacggaaagagtaggcagagtaaggaatccgaacatctccagatcgtttgagactctgaaaacaatgtctagactcgggttagtatttctactacgacattcacgagacaaagcaaggcttaccgtgtaggctatcaaaaccacctaagtcgtgttagctttattcgactgtctgaatcgagggatttaccgtggaagccgaacatgatgcctagttgctggaagcgagccggagtgagcaacccggatggcaatgcaaccttgtttttggtcaggtattgcatgatattcttaacacgggccacatcctcggggaacttctggtagtaagcttcgttcctctccttgaccttctctattttttgtgtcaatgtcacgaataagccactccgggaaaacagggaagcgcaccataggtcttcgcatagacaggatccggcccgttggtcagggggggaaggccaccagtaaggaaagcttctctcaagccctccgggctggaagttaaatgatatcagcgaggtgttcaagatccaagtatggagatcaatgagtctcaaaacatacaactttgacaagtaagtcacggcacagaagccaccgaaactttgcccaaggatactccaccggcgctggtcagccggatagtcctgtgtcagaacatcacggatagcttcgcaatcacggacaatgctgtctgcacggaagttcttgagatactcggcctgcttgattgcatctccctgacgagcaagggttcccgctgtgagagtcgaactgaggccagtgcctcgttgatccagaaagagcacctagagaatagttgagcatcaatctacaaaaggtagaatttaggagatatgacacacttggtatcccttgctgagcatgaattcgacccaggggtaagactgcggggcaccacatccaaagccagggccaccttgaagatagaccagccaaggaagcttgccctccttggcttctttgccctcttccttagcaggctcaatgggtttgttcaagcgactgatgcttcgtgcaaagagcctcagcgtgtccccagcaggcttgttgtagtccacagggacatcgaagagcagctcagaaacacgaagtttgcctagatagtgtcaaatttatcagtttcaacacccgtgggctaattagtgatgatacaaacctgagacattatggaaacgtcgctcaatcagtttcgcagccatgattgcgatgttgatgcggactgaaaatagagggcgcgttggcgacaagccgctttgcggagaaccgcaccattttttggtctaggccttcctgttcacctgcaatcacccagccgagtgaaggaaaaattgagtgtctttgtttttgtttattcccttgaccaagattgttcatagagagatgtgtaacttattgcatatatggatgagtagacggctttgaaaaaaaaataacattggatgtatgtagctatgcccgaacagatacatgtccgacacggtgttcgatgtcttcaacaaatctttctcagaatatgtgcttgatttggaccatattttagtatgtcctaggatggatacattgtagcaaattgacctgggacataaccattactttgttatgaattctgcaatcggttcgaaagcggaatcattccgcaaaaagaaaccatagaactggccgtctcacgagttcgcacccgagtgtttgttggctgcaagttgccggcctgcctttagcaatagtagagtcgcaggtagctgagcagccgcaaatccaaccataacaatcagctgcgtattgaaactaccagctaaaacgtccttcacctcctcttgtagaagaggaggtaggctttttatcgatctcacattctcaaggaataggtgcagttcgtgcgatgtcataacaccctgcaaacgatgcgttagatggccatttaatatattagatgcaatggcaagaccaatagcaccaccaagaaagcggaactgaaccacggtaccagtggcaattgctgcaacgaaaggcgatgaactagttagccaatgcatcggtcaccttagtatcaggaagttttcgggagaacacatacctaggtctctgtcctcgacaatatatggtgtcgataacacgaggatgcccatggtcagacccattcctgtcccagcaatgactagatagccaatatctgttgcgtggaagcctcgagtactggcaatggtcgaaagaagcccaataccgacagtatggactgtacagcccacgagcagagtataaataaacgggatgcgtcccctagagctggcgatattgataatagccgcagcaactgcggcgatagcagaatacccaatcaaatagataccggcctccaaaggcgacttgtccaacagaagctgggcttgctgtggaacatatactaggacgacgttgtacggtgcgccgatgacgaacgaagaactaaaagcgtgtcagaagaaattgtacggtaaccgtggatattaattagatggactcacataagtattcccagccatggacgatcaaaaagccaacgcttgggaaatatggggtctctgcccgggatgcccgagatataccattcccaggcaaagaaagcgatccagcacacccccgtgagcacaaggagcgcaattgcatccctcgaagaccatgagaatgccagattggtttcattcaatacggcgactatcaaaaatgagccagccatcatcaaaaacgatcccattatatcaagattagcaaatgagcgatatgaggctcgtgtccggaatgaaggagtgtgctgatcaaggccaaagtgtttgggcatcgcaacgatgatgacagcgatcgcaatagagcacaatggtgcactaataatttagttagcatgcttttcaacacagatgcttagcatccacatacttgacgaaaaaggtccatcgccaggccgaattttccgcaagagcacctccaacgattgggcctatcaaagatgcaaaaacaaggcaaaatgacatgagactgctgtagattggaagcttcgttttaggagctatttcgtagacacataggatcgtcaatgcgtatgtaccagcgcccccgattccttggagagctcggaacattatgctgcctcggtagttagcctctagacagaaaatgagcgcaggactacgctagacatacagttggttaactgtctgagcaaacccacaccccatagaaaatgcgagcagaatgacaagagcagcgattgtagtttgtttcctgccaagtatatcgctgatttttgtccatattgccatagaccctggaagtattatgatatcagtaatgagagagatagagactgtgggagactatctcaagacatatgttcaagaagaaaagaaacatccaaagagtagagaaattattataacatcgcatttgtatcatacctgtgtaggtggctagatatccagtgataatccagcttcttttctcgaagccttccaaatcatctgtgatactcgtgagagccgagcttacaatcgtgacatccaagttggagaggaaaaatccaatcaagagtctatacaccatcagtcttcgttagcaaaacccaatggcacttgactgagcacataccctgtggtggtaagcactagtctccatcctgtcgggtaaacaatttcacttcctggggaaggtgctctctgtgccgaccccttttcttggatgtgccccctagcgcgatctttgctagctttattcgaggtcggctctgcgaacttgatgtggctagacatggttgtcggcctctcagtgatgggtgcgtcaagagtaggtgaagactggagtggcaggcatcgttgcaggcgagaaagttttgaacgtgaccactgtctacgtaggaccaagccccgcgtatcttcaccccaggggcttcatgtggaacgccaggagacgcgcgatgacagaatgtggaatatttacatgcaaagaagggtgatccgcgtcgatcattgaacctagatatgctggattggatgtggcttggcataaatttgcttttctggggcatgcgcgattagatttggaattttgaactgccttttcgactgcttttgatgatattattctccatctttttaactgcgacatggtctggaaagaagggccctcacccgttctattttcctaatctgagacagattctccttgctcagggatagctattcgcccctggaatatgcaaacatgctatacaacatagataaggtcgttcaatgtagtcaagtaaggaggacttgtgcactgccaagctggattcggagagtaacgcgagcttgtagttgacttagcaacaaataggcgaagtccagaaatctctgctccgtaccatcgccccatacttctccccgaggttgacaggataattaggcgcaattagcatccaaggagatgtcaggggcaacatgaacaaagggcctaatgagaaacagggtaaaaccagccttaaagattgcctagacagtagttacttcgtccgtcatagattaaataaatctactcagcgcctgaggcagccaagcaagagtcactatggacatctctaggtacgaagtacatgcctccatctccacatcgcctgtctgctccaaaacttccattgcaagatcactagaagctgttcgaacttcggacttcggacatcgacttcaccttgccccactcatcccgctttccaggcttccaacgttctttcgggacgtgcccaggtgtcttccaatgatatctgtttacatctatctatttcctatgcgagatcagaaggcatcacatattgtttctggaaggtatagccgaacgttatagggagcagatcccgagaccccggcattgtataaattggccagattgttcaatttcccctctccccaacacacctttcggccatgcataaccaattccaacaagacctatggaaggctgcacagggaccctgggactcgggaattctccctagctctgaggacttagcgcgagctagagcttctctccccgcgacacttccgaatacaggatccagtctcgaatttgtccagcggcacattgtcgacgatattgtcccggcattcaatggaggaagcataagtgccaattactatggatttgtgactggtggaactaccccagcagcgctcttcgcggacaacgttgtatctgcttacgaccagaacgtccaggtccatctcccaaatcactcgattgtcaccgatgtggagtataacgcacttggtctccttttagatcttttccaactgaagcgttctgtttggtataatgggactttcactactggggccacggggagtaatatcctcggcctagcatgtgggcgcgaatttattttgcaaaaggcggcgctgagaaaaggctgtcatctccagagtgttggtgaagagggcttgtttgaggtattgaatgcactgggtctttccggggtgcaggttttatccacgctgccacactcctccctcgtgaaggctgctggtgtgctaggcatcggtcgttccaacgtacacaacatctgccgagccgacgacccgctccgctttgatattgataagcttcagaaagaacttgcgagaacagacaaggttagcatcgttgcaatatcttgcggagaggtcaattctggtcgttttgcaacaagcggtgcggatttgagagaaatacgccagttgtgcgacaagtatggagcctggatgcacgccgatggagcatttggaatatttgcccgtgtccttgatgaaagcccagagtttgcaacaatcaagaagggttgcgaaggaatacatctggtcgactcgataaccggtgacggccacaaacttctcaacgtgccctacgactgtggctttttctttactcgacacccgaatgtggcatcgcaagtattccaaaacgcgaatgcagcttacttggctgctggagactccgatggcccttccatcccctcgcctctaaacattgggattgaaaactctcgtcgatttagagcattaccggtgtatgcatccctattgtcatatggcaagtccgggtatcaacaaatgctggagcgtcagataaggcttgcccggaaaatatatggatggatattcgagcattctggttatacagctttgccagaagcattgtccaagtctgagttgcttgatcggacatttatgactgttttatttcgcgcaaatgatgaggggttgaaccgcgagctaggaagcaagatcaacgagagctcgcggatgttcgtctcgggtactagctgggatgggtcccctgcttgccgcattgcaatctcaaattggcgagttgatgtggagcgagactttgcgctggtgacagatgtgctggcaaaggttgcccagagctattggaattaagacttagaatctcaacgattggacattcaacgcttaaatctatttttttttatatctctatagagggtatcagcgacgacgaccagctcctcctatattctcagtacggtcagacatgctaacaacctctccaatacccgctgcttcttgctcatcttccagagccatgatctcctctcgactatcccaccacttttcttcggccacagagaacgctgctttgcgcaattccttgattgacttgtcaccggactgttccttctccttgacaatctccatcatgatattctgccattcttcagaagtgcggctgaagaactctcgcaagctttcgaacggccgaggcaatggtcggttgtcattgaaagtttgctcttctggctcctcaacttcaagttgttccatgtccttggtaacagatggcaccgtcacatctgtccgggcaggagagggagcatcaagggacatcgcttcggcgtcagcctcatcgtcttcatcctcatcgtcgtcgtcatcttcgtcatccatttcttcgtcactgtcttcggcttcgttcaagaggttccaattctcaggctccctgtagaataactccttgacaccatccagcttgactagatcaatggaatacatatcgtcgaaggtgaactctcggtcacccttttcaaacgtaccaccaaagatgaatagggtatcatcttgcactgctagctgggcattgaatcgccggtggggcattccgaagcgaacaaccgagggttttgcgggttccacaggctcctcgggtcggggcgggcttgcttccataacgttatcatcttcattgtcccgaattccaactttagcttccagggctttgaggtttgccaaaagctcttcctcatccgctttgcccctatttttagactttgcattttgatttgcctgctgctttttgcccggcgcgcggggacgtcgcagactcaacgggaagaaacggtttctgtcggtagtccaagcaaagagagtatcgaagaactcgctgtcaatgccctcctcggttagttccacgtcgtggacaccaccaaacatgattcctcgacccttgtggtatgccatggtagtgccaacacggggcgggttgggcgtattagcgggcttctttcgtcgttcccatcggacaacaggtgccgttgacgatggagcctcagctgcagggggtgtgattctcaagaaccaagtatcctggtgaaccatgggccggagagccatcttctgggggccgccacccttgccttgcttaccaccacccgcagctgccttcactcgggagtagcccccgtagagaacagctccagtctcgtgcggtagcagagagaatgatgagcgaggatcgggtttttgggaagcaagggtcaatgtggggttgtaccaagtatattgattacaatcataaatccacaggtcctgcaagtacttagtctgctgggaggtatcctggaatccaccaaagaggatgatgtagttctgtctcgggattagctttatccagaagacatatgctgaattaaaacacataccttgaaatatgtcatgcggtgaccacttctagcgggaggacctttgcctttaacctcgagacgggtccattctcttgtagctgtgtctaagtgccaaaaatcattgtagtgataaaatgtgccttgtttcggcgacgagaactctcctgctgatagtaagtctccgcacaaacaatttcaatatacccagcaagacaaccttacctccaaacatatagatgcctccggagtttcctccccggcaccatgcatggccacttcgaggaagagggctgttgggactagtcacttctctccattcgctacggtcaatcaaatagatgaaaaggttattgaagaaagtggcatgcgtcccgtcaaagtactctccaccgaaaagcaacagctcatttcggttcgacggagatgctagcacggttgaagacgaacgtgaaaccgggggctcggaaggaacctcagtgacctttaagaatttggcctgttcttcggcgtactgggctagaatggcatctaggtctgcgtcttcagcatcgctgtctgcatcctttcccttggctttggacctcttttccttctgcgcggacttctttgattgcttagccgctacacggtccttgtgctcggctgatttcttagtctttttacccattttggctccacgttggattcagaaagtgaattttcgcgatcttcttttcgtggggcagaaatcatgccttttccccacaccgaattaattgcccccctccagatcgatcagatattcgtctgtaggcgtgttgcttccaccattcgattttatttacatgtaactttggcaaatataagaaataggataagaatgattattcccactcgaatttaatttcttagtcctatttgaccgagtaagttgaacgtagttgctgctatagatcgatttgtttgaccgctcacgtgccgacgcgtcgatatcgggttcgcgattgtgcccatcgccccaaacatgaagatcgacggccatgacagcaacaggcccccatgacgaagaataacttagcaactcatctcaaatggttgttaacccaagggaaacctcttaacccccctctggcacaaaccggcctgcccgaacgcaacaaccacgcattaccacaattgattccccccgccgccgaactcgcggccctggatgatatccttgaagacacggaaaatgagacgaatggttcaatggctagattgttaccccaatcggcgagcaagcctcgattgctaagccgacatgacacggtccccaccagtactctgtcaagtacgaagaaacgggattcgccaaaacaatcaaacatagctcgaggtacgtaaacacacgagacgagtcttgcgggaattatcagactgataccgcctgcacggtgattagagtccttccgagaaccaccattatcatcacacaaaccttcccggcaaaagtcgactccatcgcgatcagacagtttccacgcatctggccataaagatattgaatcgattgatttgacaggggagcttgatctgtccacactatcctcggagactatcctggcgggtgagccgcgcgggtcatgtgcacaagaaagtaccccgtgcggaactcgtgagaaacgcggcaagaagcgcaagagtgacgagtatacgtctgatcttctttccccattgaaacatgcgacgaaagtgcgaacgccctcgaaagtgcgaaccccctccaaagccgctctaccccccgcccgtagagacattatatcggaacagcccacagtcccacgtcagacaactcaaacaacccaaacaaatcccccaagcgcggcgaaacgacctgaatatcattcacctactgccccacggagccatcggaaacgagtgatcgcggattcagatgatgacgatgatctctttgatgactgggctgttagtgaagatccggccgataagatgatcctcgatgccggggagaatttgtatccaatacttcccgagatgagtccagcggcggacgagaaaatggtcgagactaagcattcacgattggaatgtacgcccaaagcaccgttcccgactgcgcaactatcgactcagccgaagaaaatggcagttgtcaaagaccctaccccgtcgacgccttggtcgaagccgtccagctcatcacaagaaaaggatccggatctcctgaagtttttggctcttggaagcaatgccttcggctatgcaatttccaaattgaggtctactctgcagaagaattctgagattgtttatcaacaggccatggagggacagccagtcccggaattgatcgctcaaaacaagactcttgtcgctcagatcgaggcaattgaattgctgcaaaagcatcaaaacacgcacaagggcagcgtttctcgcaagcaagacctgaagcagaacttgatacgtgtgatctcacaaggtctagatccaacaaccatgccagaagagcttgcgcagagtcgagcagttgaggcagagttggaacaaaccgaaacaaaaatctgtcagcttctatctcaagtcaatatcctcgaattagcgcacgattgtccacctgaaccctcctatatgaaacccacgcagcccaccttcgaagcccatgcagtcgcacaggagcccgctcttgtctcttcttcgcgtgccgactcaaacacagaattccgtagccaacagcgtttgcctctcacaagtcccagaaagaccaaagacacccgtcagccagatagctatgaggactgtatttctcggaatatgggctctccactgttggattcgatggatattgatgagttcgactggaatgtcagcgacgatgacatattagaagcggcagtgggcttcgatggtgctcaacagatacctgttcgcgagcaagccagtcaaagccgcaaggtttttgcggagacctctggcaacgtccccaaggtgcccgtcccgaagaagtcgcccggtcatagcgccttctggtcaaaccatccatggtctcaagaagtaaggaaagtgttgaaagaccgattccacctccgcggattccgacccaatcaacttgaagccattgatgcgacacttgctggcaaagatacattcattcttatgcctactggaggaggaaagtcgctatgttatcaattaccttctgtggtaactggcggacgcaccactggagtgacgattgtgatatctccattgctgagtctgatggaggatcaagtatcccacctgcgaaaattgaacgtcaaggcctttatgattaacggcgataccgaccaacaggaaaaatcatggatcatgagccagctctcaaatgcaggtggcgaggggttggaggtcctgtacatcactcctgagatgcttagtaaaaaccaagccttgattagagcccttgagaggcttcacggaagaaacagattagcgccgnnnnnnnnnnnnnnnnnnnnnnnnnnnnnnnnnnnnnnnnnnnnnnnnnnnnnnnnnnnnnnnnnnnnnnnnnnnnnnnnnnnnnnnnnnnnnnnnnnnnnnnnnnnnnnnnnnnnnnnnnnnnnnnnnnnnnnnnnnnnnnnnnnnnnnnnnnnnnnnaaaaacagattagcgcgcctcgtcatcgacgaggctcactgcgtcagtcaatggggacacgatttccgacctgactacaaagagctaggagaggttcgagccaggttccctggtgtaccggttatggccttgacggccactgctactgagaatgtcaaagttgatgtgatgcacaatctcaaaatcactgattgtgaagtgttcctacagagtttcaaccgtcctaatctcacctacgaggtacggtcgaaaggaaagaatgatgaggttctagccagtatggcggaaaccattacaagctcataccggaatcagtgcgggattatctactgcctctcgcgaaagacctgcgataaggttgcagaggatctacagaaaaagtaccacctcaaggcaaacgcttatcatgcgggtatgtcagcaaaagcaaaatcggaggctcagaggaactggcagatgggccgagtacatatcattgttgccaccattgcattcggaatgggaattgacaaagccgatgtgcgattcgtcatgcaccacagtatcccaaagagtctcgaggggtattatcaagaaaccggtcgtgctggtcgagacggcaagcgttctggctgttatctttacttcggctacaaagacacagcaaccttaaagcggatgattgatgcaggagatggcagtggtcagcaaaaaggtcgtcagaaacagatgttgcgaaatgtggttcaattttgtgagaaccgcagcgattgcagacgagtccaagtcctcgcctattttgcggaatacttccgccgagaggactgcaataacacctgtgataactgcaagtccggtttagtgtttgagcttcatgattttactgagcaggcatcctgggccatcaagattgtgcgacaattccagaacgcacaggagaaggtgactgtgctctactgctgcgacatacttcgtggggattgcaaacggcctaaagccccagagcatcgcaagatgccggggtatggaaagggatctgatctcgaccgtggagcagccgaacgtctgttctaccggctgctaggtgaagacgcattggccgaagacaacgtgatcaataaaagtgatttcgctgttcagtatatcatcctcgggcgtcgtgcagcagaatatgagagtggccagcggcaaatgaaactacaggttcgcgcgtcaccgaatagtaagaccaaagccaacagcaagccctcagctgctacgcaaaagaaaaagtccaggaattcaggtggcgatcctcagtcaaccatggtatcttctccggtgcaagctgctcaaaaccgccgccttgaccgttatcaatatgccggtgctccagccgtaccttcctcgctcgatgaggatagtgatggctttgaaccgattcgaaccaccggcaagtctcgccgcgcaaacacacgcgagatgggccctccgattaccagcgatcagaagttagatcgacttgatcacatgcatcgtgtagttgtggaggactttcaagagcacgccaaaatcatgcttcaggacgtgagtaatcgctgtactcattagtacatcataaagaaactgactattgttatagcttgtcgttaagaagggccttcggtgccaaccgttctctgaccaggtgctacgtgatatgggcatatcttttcccacaagtaagtacgatcccttgatgggaattggaacaccaggttaacaaggaaatagatctcactgagctttctgcgatccccgacatcgaccaggataaggtgaagcgctacggccggcagatactgggactggttgacaatgcgaagcggcggtacctggagatgacgcaggaagcagagaccagcggcgttgttccggatcccaaccaccataatgtcatcaacctcagcagcagcgatgagtatagtgacgacgatttgttcatggatgaggcttccttcaatctggacaatccagtcttggccgcacccagcaatgcagttgaaaatatcaccagtcgctacttccctccggcagcatctccgggatatgactctggtgacgactgggaatctggcgcggcgcctcctggctccaagggtcgcaagcgccagcctgccagtggcaaacgaccatcacgacggaaatatggctccgctggaagctggaagggcaaagtcgcgcgaccaaaagtcaaatctggcgatcgtcctacaagccagtcatctgcgccgcgaaagaactccagacccaaagctcccaaatctacgattggaatgatgcctatttgatgttcttcttattgttctttcccatcttttgtcgggatgtttatgattggttcggcgtttacacaagcatctctaggtgttcttttctcacggtttgtagggagtcattcgaaggtagtctataggtgccgggttatgtagtatttgaaatgttcacaaaggaccaggatatagaacgatacacatccatgaatcaataataccattttgttactcaatcgtggaatgtccctcattcaattccccagtgagcgaccaaaatcaatcaatcgaagtcgccgtgcatctcgagggtgaaactgcgcgaccttggctctcacaaggaatcttgaagacgccgagtcgcgctccaaatcgatataggtgttagcctccaacatagcgtcgagaagaccatgcatctccttcgcaactgcctcccttttgtttgtgggagcctcatccgcgttccgtttcatgaacttatcaatccgccgctgtgatccatcctccgtttctgtcggctctttctgcttcttgggcttgccgtgtgccgtataacctgcctttagcgtagcatctgacacctcaaaagcatcgcctacagtcgggccgcccagatcctcggcagcaagcattggagcaagagtctcatcgatgaacgtatccaacgagaccttgaggtttgcagacgtgcggtccagttctttattttgctctttctgcagggtaagctgctcgcgtgccacctgtgatggagtctgctcttcctttctcgtgtttgcattgcggattctttgaattcgctctcgcagtccgcttgcgatcgattgagagtcgcgtagattagcctcttcaacccgcaggcgctcgcggtctacagacagctgttcggcagtcattgtgacagagaccttgttttcttgaacaagacgtgcggtttcttctatggctataagtgatggcagcaccgaatctgttgctgggagctcatcgtcggacttaagaagcgagtcgtaggctttcctggcccgtcgggcttgggaaatacgggcccaggaatcggtacccgtttctgttaaatcaagggaactgagctcccgcagctataactcatgtcaatcgaggcgtcctactataattggaatgacatagcatgccttgttcaattcatcctgctggcgtttgacttgctcttgaagcccttgcaaggttgcatctaaacgtcgcgtgtaaacatgcaatgcagtctcactgagaggttcttttgccgcttcgtgttctgcttcttggcgcctctgtgcgaatttctggatcttctgcacggtttggtcggcgatatccatgcttattttggtggagtgacgcaaaatgcaaatatttccttctagaagtaaaagaaatacttttgatttagagctccattgtccttgagacttgctgtaaaatgtttgattgaagcctaagagacaatcaaaatatcgaacacgagcatcacgcccatgcaacattcgcgtcgacgtcatgtgaccaggtttcagcctcgacttccttcccccatcgttaacttcacctcttctccttaatcaccgggatttgattttcatcgccttgatttcttcccttcattccacctttcatcgccatttcaccacattttcgtcaataaagctatcaactcgtcgatagcgagttttagcccacacccttgacctcagattcagacgttatcggaggctacagtgtggtacagcaggcaacggtttctggcgcttgatatcttgcttgcctcatttcctatttcccatcgcgttcacccaaggatcctatctccaccctttcgcttccttattcatttcgagcatctcggcagatcccgtgaagcttccccagttgtgacagcaaagccctctcacacttgaatctgcacttcttcccgtcttacatcggcactgcctcagtaccacctttccctcacagcctctccaatcttctcaaagcaccaatttccccttccgatcgccagcaccagcaccttccgtgggaaattctggtgtacataaaacgatcataaaagaagaaaacagatttcattcttgacaccttccgatttcacttgtaagtgaaaaacaaacagcagcacagactatccaagatgtcggcttctccatccaaccttcagtcgaccaagcgtcctctcgaggacccttcgtcgccgtccggtcccaatgaccagcctgaggccaagcgcccggcgctagacaaagtagtcaagagcgatgccgaggcggaaacagatgtatccagtagccaggttcctactgtcgtcgaaggtgccaaggatactcagggagatactgtggtccccgatgcgcccactggcaagggtctccctgtcgacacccaacccatccaatcaacagcttcccaggccgatcgcgcgggttctgatcaaccaccccaggacgagtcgagctgggttcatattcgtgcggtgatctccagcccggaagcagccaccgttattggaaagggaggtgagaacgtgtcccagattcgtcgtctgtccggtgccaagtgcactgtcagtgattattctcggggtgcagtggagcgtatcctgacagtcagcggtccccaggatgctgctgccaaggtaggttttttcttccattcaataggtttgttacgactgttcgattgctaatgacaaatattaggcgtttggtttaattatccgtacccttaacaatgaacctctagaggccgcttctactgcacaatccaagacgtaccctctgcgtttgctaattcctcacattctaattggttccatcatcggcaagggtggcagccgcattcgtgagatccaggaggcttctggtgctcgcctgaacgcctcggacgcttgcctccctctgtccaccgaacggtcccttgtcatcctcggtgttgcggatgccgtccacattgctacctactatgtcgctgtcaccttggtcgagcagctgtctgaacgttacggcggtcccgcggcctcggcatatgccactcgcagcggcggtcctgccggtgctgttcctggtggtatgcaggttgtgccgtacgttccccagcccgccggcggccaatacggccatcccgacacgttcaagcgtcaccaccctcaccctaaccgtgccggtggtggtgcatatggtgttccctacctgcacggtcagccagcccctgctcctgttgctcagaccccaatgcacttccccgccgctccccaggccccttacggcggcgtaggcccccaccagcccgctccctttgttggtggccctcagcagccgacccctggccgtggacctccaacagcccctgcccctgtcggcgctgccattcccggtcagccattgactcagcagatttacatccccaacgacatggttggtgccattattggaaagggtggtgctaaaattaacgagatacgtcacctcagtggtagtgtgatcaagatcaacgagccccaagagagcagcaatgagcgtctggtcactatcaccggtaccgcggagtgcaaccaaatggccttgtacatgctctattcccgacttggttcgtctcccccttccctaggtgaagctgtgcatagctaggttctaacggattgaccagagagtgaaaagcaccggatctaagtcaagcagcgtaacatacaacgcttgctgagagttttattgcgaggttctgcccaaaattctacggtggttaatgaagtctccttttgtttgccttcgctttctctcagggcgttattccttggttctttctttactttctcgttgtatcttattccaaggcgtgtttcatttcctgccattctaattaacaattcccacacaattatccctgaatcaagtagccctttccctttccactacctgctctaatcaccaccgacatattctattatccacgcaacacagctcaaatcatccatgccccagcattaatccatggcaccaagctctccttcgttcctctctcgcttcccctttaccgctcttatttctctccccttcccccgcctaacccgaaatcttttggaaactaacatgtttcgtctccaacccaggaataggcggcaacatcttcttcctcagaggcgccatactgcgggcatagttctctgttttatcggccttgcgatgcgcctccatactgttccagccaacagccaggaggtacgcgaaagcttgcccactcggactattctcgtgcggcagcttactcggccggtcgacatgccccatcgaccatgatcgtggccccattgactgtggtagctgctcgaccatcgcgatgcggaagctgatcaagtccgcgtcgatctgcttcattcctgacacttcgagatcactcggaaatgacagcgtgcacagctcagtcacggggtttttggttagtgtttctgtggcagagagtggtgggctgaaggtgacgcgcagtgatgacggtggctggggattgtcgggtgccaaaaactcgttgattagttgaatatctattgtgctgcgagggtcggtccagtctgttggtttggttaggctataggccagaggttgtaggtttctaggggtgggtatgtatatcgtagtttgagaattgtttcagggatgctaaactcacctacaacccagacgatggtgtctttgtcttcgaatgtgtatccccaggatgagcgcgcatgaccgctttggtgttgggtcgcctggaagatcctcatcagactcttgccttctatgctggacgggtcttcaggcttgacggaacgtttgacgcggaagaagacgacctggctaacgattggagacatgctgggatggtgtttttcccgacaaatcgtgtagatgggagagacaggcctagagtatcaaaatacagatggctgatgtcacgagcacatgatgtcacttgcatcgaatcccaattaggaaactaccctggtgccttttccttccttcctatcttgtgcagttggtatctaccttggaagtacatatgtaggtgcttctctatggtctcctcttctctcttcctttctcttctcttcccatctctgctcgaatctgctcccctcgacaccatgcagtcatacacactaatttcccggttatccaattcattccaagataaaagcaatcgactgttcttattctctgctttttcaatcgacgtcgtaaaccctagcttcacacttcccttatgaaatggatatgcttctggcaccatgtggtttgcctcatgctggtacatttcacagccctcgcattcttgatcgtgcggcttcttgtcttatcccaaaacgaaccagtggctcatatcatacatatgtattaccattggttgcgggcactggtgaactctcgaatccaaccattatcacatcgctgtcaccttgcctgagcatctcttccgaatcaatctggttcctcggtgaaatcgaactatcgccttggaaactgcttgcttgcctacctgaagtggggggatactccaaattgaatgtggactgctatctcattgtcgcaacatgagttagggtaagaagatgcagaggatgtcttttacgatatccgatatctgatctctgcttctttgacactccagattcttccatgttgcggtgcttgactaatttatccggtatagctatcttggatttgagattccgttgcctttctatcaaatggcagttcatggcttatggtggcggctcaacttcgtcgagttacttgaatcgtagctatggcattcgatccatatgaatctcatgggccagaacttacactacttgtgaaacttgatatttttccctgaacatcttgttcatttttagatgctctattaatctgtcagatgtccccagaagatcacattgactgcaaacttcatgcatctccccttaattccatactctcgatcctggcagaacacgtatcgttttcctcgtcaactaaaagaaaatcacactccggtcaagatgaactaactctacgtgcgatgatttctctgggccaccagagtgctaaagtcttagcctgggctatgactgcatcgttgtggttctcatctctatgaaatccacctactggtagcgatagacataagtatctatagtgatgctgtgcgtaagcggaaatattggcgtcatagctttgaatctgttgagccacagactccatcagctcttcgtcattattggtaatcttcattgctttcggaatttctatagtaacccaaagagctatatcatctttagggtctaccagacactcgaagcccatcatgaaaggacaactatcagtcgcgcgtcctgccattttgctggttggtagatatgatatgtttaaggaaaataagattttttgcaaagctatttagaggaatgctggtggtgaatatagagagagagactcgagggcttcggggttttatatgagttctgcgccgtaggctagaacaaggacttttgtttggtcattagtacaatggccttgattgaaaccccttgaaaccactttcgttccttgatcgcttttcttactgctttcctaactatgtcattgaccgaatttcgttctttgccaggcgttagggatacatctcaagatacaaagccgatgaagtctgacttatatgtcggaaagacgaaagcaagttccaaatgagaatcctacacttaacaataactagccctcggcaggagctaagctgacgcaaataactgcatgtagataatagggtttgaatttgatagttaatttagccactcactgtgacgctgaaaaaagatccgctacatacgtatctgcatgccatgactccctggtccaattaagaccatctaccaaataacaatccacgctgaaagcaaattcccccaaatatgggatcggaatctttagagaaaacccaaataaaagcgaagcagaaaaaaagaccgaatctaccagtcgacgctgcgcacctttgcctgcttgtcctcgaaggccttcttcaagttggcattcaagcgctggcgacgcgacctgttggccttatattggatggcatcttcttgcgggagggcaggctcaccagcaccctccacgctgcggagacggctctgtctcacagagccattgatgctggcccggaagttgagaccgcgtgaaacggaatcgggggtgtgataggcgctaccgtcaatcgagcctcgcgacccaggagtcatgggtatacggccagcggcgttcttgcggggagtagagaatggggagccttcacggcttggaggccctgtggagacaatgtccacgccgagcttgcgcatctgtgcctcgagaacatcgatgtctgtgctctttccctcggccatgctcatcattgtagcaatagtcttggtgacagcctcgacggttggtcggtttctgcctccgccattcgtttgcggaatatcggcgattttggcacgcaggagagagactgcctgttcgagagcggtaatctcgacctggatattcgtgaatgtggtgcgcagatcatgttggagcgcaccttgctcagcggaaagtggtgcttcgagaatagcgccgatgtcagtgtgtgcgtcaagagtcttgcgaatgcttgcgaactggcctcgcaaggtgacaatctgctttgtgagcaggtcacggcatgcatcgagcttttcatccaccccctgcacccgctggttgtccaatgatcgcgaaattgaagcaatcaactcttcaaatctctcaatgtccttgaaggtcatcttggtgtcgagaatgtcagcgggctggtcgccgttcatgacgatcacccactcatcaatatcagagagtttcttgggctgttggtacagaaggaatcctgccattgacctagcatttatacccaaggtatctaccatagagttgatgtcacgatagagccgttctacctgtccggcaatacctggctttggagtgtcgcccatgtagttttggtggggcaagaatgggtccagggtatcaacaggctcaacgggctgagccagttcatcacgaagtctatcgtcctcgtcatcgtctgacaaagataaaacatcatcttcctgaatttgagctgctgcatgtgcacgtgcttgcttctcttgctcctcacgctcctcacgagcaacatcgctggcttttctcaagtggccgctacgctgggcgatatgggtaagagatgccttacgcgaatgcaatgcgcctgtggaccccttacggctgtgtgatttctcggagaatagcacgttcttcttccctccgacccgaactggactcggtgaccgatagggctcacgattacctttcgcgatagagaccgggggagggagcagtgcctgcttagggatctccccaaatagctgctggggaaggcggcctttgtcattcacattgcgagcaggactatcgaagaatcctccggtggagctttgctcggaagctgcatcaaacgagctctgagctgactgcttggatttggcgattaatgcttcgtcatgtgtaatttcttcgccactatcactgaagtctgacccggctgcggcctcagaatctgcatcggagatacccgattcatcagattcatcagggattggaactgcctcttcggaaggtttggtctttggctttgcggtgaagtcaggaggcagaggtgcctcctcgggaacagccgcagcctcaacctttttggactttgtcaggaagtctggaggaaggggagcgtcgtcgggaacagccgcagcctcaacctttttggactttgttaggaagtctggaggaaggggggcgtcgtcgatcttgggggcaggtttcttctgattgaggaaatcgggtggtagaggggcgtcctcttcaggttttggtgaagccttcttcgccttagtgaaatcgggaggaagcgggacatcctcggcggagcacttcgacacattggaagaagcagaagtatctccagcggcataactagcccggctggtaggatctggtggcaatggtgcctctacatcgagacttgatgtgttaggccaattcttcttgggtgtctctgtcttatcagacagtgctgacaatgggctggtcacgcggttttggtcagcactactgccaaacatcgagaatgccgacttggtgttctcggccgaaggcgttgtctttgaactgaacgttgatgtaggagtctgtgaagcaggtttgcttgccccgccgaaaattgaaaatgtctccttattcacaggctcgatatcttcagtgtcatccattgattcactcggtgatgagcttcccttgcggggcgttgacaccatctcatcaaaggagccaccaaatgagaacgcaccagaagaagatttgtctgcatttggtccatcattggcagccgaaccatcgcccttgaaggcagatttgagctcaaagccaccttgtgcggcgccaaacggattcttgacttcattggatgcttgaggcgggaatgaggtctgggtttgagacttggctccaaagggcgaggcagaagaggcgtttgcgaagggcgacccttttgactgtgtggccgcgaacggtgatccacctggctgtttcgctgcgaatggtgactcccccggctttgctgttgcaaagccactgaagccgcctccaccggagaaggcgctgaagccagcaccgccagatgctacacctttggcaccgaatgggtttgccggggaggtagactgtccagatcctatagccccaaatccagatttcccgaactgtggctgtccaggggtactaggagtgccgaatgatgcgcccggctgagagggggtcccaaaagcgggagcaagggccggggacgatggctttccaaaggccgggctagggcttccaccaagccgggacggactaccaaatgctggagcactttgttttccaaaagcagttgcacccatggttgaagctcccaaggtagatgggctaccaaagacggaagctccagctggcttcccgaaagctggttggccaaatgccgatgaacctccgaacgatgactggccaaatgcaggttgctgtgccggggttggagctacagcctgtggctgagagggagcttgagttgcctgaccagacgagatcaaccccgaatatgggatattttggcgaatggaatcagcgtaaacgaaccaccaagacgaaaggataccatcattatttagaagaagaaccccaggaaggggcgtcgagctctccaagatatcagaacctggaagcggtgcaatgacattttccgtggctgacaagttttgtgccaggccgatgacggatgtctcatctccagagtccttcaacggcacactagcacgtttggtgtcgtcgcttacttctgtggtcatgaactgaccaacatgaagtttggttcgctcatcgttggccagaggctgatcagatcgcgtaatgagcccgagatcagttgacgcagttgacgcgacaatcaagacatctctcaagtgaggcttgtactctctaattctggtgataaattggaatgcaggaccacgtttcagcataaagcccatagtcgagcagacttctggcaatttctggatgaggaacggcgcctgcttgcggcgggttatgatgtagtatgaagaagctgggttcattcccatatcatcctctgaaacatttggtgtgtatgtcacaaagaaaacatcgttctcaagccatgcgattgatgaaactgtataatcgtaagcaaaaacacatatttggttctgacaatcattcgaaacttactgtggcaatctccctccaggtcagatggccgaggaatttcagccttcttcgttccatctggggtcatctggtatccagtgccatcggccaatccagcaacaagttgttttcctttgttgctccatgaagcacagctgacaccatccttgagaaccgggccattgggtccaggaactaggctcccagccttgagatcggcgataagaagctcgccattaacggtgaccagcgcgacaagtgtcgaggaaggctcagggtttggtgccagtgctcgtagcgacacgccattcgtaggaattgaaatcgctggctgcgcatttccttgtgtgagggtgtttgtatcgaaaaccgagattgtggagccattctccgtggcgagaatcaagccgtcgtcgcccggtgtgaatgccacatgagtaggacgagaaggaaggggaattgtggcgataggctggaatggcttcgtcttctccatatcttctccagctggcgcctcgatggactttctgacaacatcagttgtacctattaccagcgcatctgggccagcgccaacaacgaggcctttggtgtgtgcgacagccagaagtgaggaagtaggagcaggaagcgcgttgtcgggccatgccgttggaaggaagcggatatttgcgtccccggagactcctttgaaaccgacttcctatagctatgttagacaggatggcggtgagttataactgcggcgggttggacatacatcggtaaaaacatcgggaagctctgaaccaagctccgcagaggcgcttcccccagcagggttggacgcaccgaagttgaaagccattctgagcttttcggaattgaatgtcgcagaaggagaacgtgtgctttcgcttagaggagagttatgtctgaaagcattaggtgagggtgagttgggaggtgtggagagtgagcgtcgacggagtgatttaggactccgggagagagtctgagagtatgcgcgaaaatcttgagcttgcgtggcttcccgggaattacaagacagacagagagtaaaaatggacgcaacgggtatcgccgacgcgcaaaatgttggaaagagcgaagtcacaagagactacataaagaagcattgaattcgaaaatgatggtccggcaaaaacaccttgtttatgcctgataattgaggctccaatttaggctgcgggagcttcgtcactccagacagctcacttcctcttcaccatctccagcttgctacctcattcgtccatccatccttctcgatctcctctcatattcgaatttcgctctcttttcttcctatacccattctctatcctgataatcagctcagctggtcgcgaacaccagcgttctcacgatgccgggcttcgacttcacaaactacaaccgcaatgcggcgcttcacgccaggggtgttccccttcccaaggccacaagtaccggtacaacaattgtgggctgcatctatgataagggtgttgtggtacggtcccaagagatgcaaggagattcaaaagagctgtgacccaggagctgactcgaatcgccataacagattgcagcagatacccgagctaccagcggccctatagtagcagacaaggcaagatacaccgatgagattatgtacagtatccttttagagggtctaacatcctttgtctctagaactgcgagaagcttcactacatcgcgccgaagatctggtgtgctggagccggtaccgctgccgataccgaattcaccactgcgctcatcagctctaacgtcgaactgcactcgctatccacgggccgcgacccccgtgtgatcacctgtatgacgatgcttaagcagcacctcttccggtaccagggccacatcggagcgtacctggttgttgcaggcgtggacccaaccggcaccggactgtacactgtgcacgcacatggatcgacagacaagctgccgtatgtgacgatgggatccggatcgctggctgcgatgtcggtgtttgagtcgacctggcaaccagacctggaccgacagggcgccatcgacatctgcgccgaggcaatcaaggctggtatcttcaacgatctgggctctggtagcaatgtcgacgtgtgtgtgatcgagaaggaccagccgacccagctgctccgcaactacatgaagcccaacgagcgcccccagaaggagcgcaactaccgcttcccccgcggtaccactgcttatttggaccagaggattatcagcaaggaagatatgaaaaaatatgttacgatcgaaacgctgtcgggtgatgataaccttgctactggggacagcatggaggttgatacttagattttcttggagatgcactgaccagtggtcttcttagattgatttaatgcacgcatgggtttcttatctcactatgttttctgtatgattgtacttcggcaaagaccgcgggcttactgttgtggggtttactacaaggtttcaagcagttacggccggacaggaaatcggagttttcagaaacttgatgtggctttcatgtaaattgtatgctcatctcagcaccctccctctaggcaaggtatgtattatattgaagcaggggtatcgtatcgctctattttagaaaattcccttgtgtagatatccattcgcacaacacatctaccaccagtcaagcctcgattcaccaatctgaggcaaagcagtgagctcttcaacaacctcagagctttcaaacttgcggacaatccaaagaatgtactcatactgagtagccgagatacggcgaccgtcacgtcggtaccggacaacaccagcatgatacatggcccgcacgaactctggatccacgggcccgccgtgtctgcgaagatatccgtaaagccagtgaaccatatggaaagactgggacggagtcaagtgtttgcagcaggagagagcaaccgccagctggtttatgaggtcgaccgctgcatggggatcagggcatcggctgtttcgcgggcctgggtggtatcgcacgaggaccttatcgtcggggtgtgggataggctgccaggccttgtggaggctgatcttaaatggggtgttgttgttgaggagtctgaggatgggccatatgctctttgagtctcctgatcgaacaacactcaagagctcttcaactgtggccgggctggtgagatccatgcagtggaacatttggtcgaatgtgctgtggaaaagaccttgtattcccttatatatggatgggtttgtccacacttctgctagagagagctggcaggtctccagttgctcaagggttttgcgggtggttttggtaatggaatttttgccctttttgttgagggctaggatcagaaggctattgtatgggagatcgaggtcatgaatttcccgcataaagtccggaaagaatattccgctggtaccttggatcaacgtttcgtatagatttagcaatgagcagattggttgatctgttgctcttgaacttttgctgtacatgggcccagtggatcgaccaagcgttcgtagaagccagagtcgcaaaattatctgacgttgggttgaatggctcagaggggcatgcttgatctgtgtttggacacacgggagagggaaatcgaaccagacctgtgactttgcaacagtcgaaatgacttcggcatttgagaggcaatcccgccatctttcaagcaattggtttctggagtccctgtctgctgaagacgatgccaatgactcggttacacgaatcacacagtccgccgcgctgttaacatcaagctggctgaagatcttgtctggaaatggcaagctggtctccgaatcgacttccatagattccaaccaagcttgaaccaaagcagtaggccactggctgcggctctctgcatcatgggtttcgatgatgagttcctcggcaaaacgaaagctgcgagtacgcaagagcacttcaagccaagcatcaacaatgtttctgtccagatcgtggtatccgaggatgttacagcatccaatggctttccacatcgcccggtagtgcttcaacaaagctttatggtcccacgatcccagagtcttgtttcgctcgacgataatattgggtaaagcagtaataatcagacagatctcatcggttgaaatcaaccccaactctaaagcccgattgatcgcattcaaaacagcagtccgtttgccgcgtttcgtttttgttcgcacaaatatttcgacagctgcagcataatttcccgatccccgggtattcaggaacggatcatccaagaacgcaattgcttctgtaagatctgggtctgaacgagcaagtaaccgctcgaatatctgccggctgtatcgcggctcccggtggaggtcaattctcaaccgacgagtgaaatcccttacatcttcaatgccccaattcttcccatccaagaatgcctccagcatctgctcgcgtgtaacttgatctgcattggcaatgtacgacggagggccatgagtggaatggggtccaggcgctgggttctggtcggagaaagagaaaggtagttcaggaggacccaaagaatgatctgcgaggccttcaaataaagattagcggagactcaaaagactttgcgtgtcttggccacatactctgggtttcgaatggcgctctctgccacggatggtcggtccatttcatgtgctccctcccattgcggccaaacaggcacgcgatatcttcagctggtcctccccctatactcgccagagcggtgttccttcgctttgcaaggcgtctccgtgcttccaatggcccgggaacacagctcccatggcgccgttgaccgttggcgaagcgacgaaacgtggctgcgagtaggtcatcgctgatccagggatgctcaagtgttggagtagctggcggctttagagcatgccggtagacatgtctgccgaaagacatgtggttggctaggacatgtgcaggccgattgctgtcttgggcttgtcgcgagcactcgggatcaactttcgcatggcagctttcgattcttggcgtgatgactaatcacggctcgctccagtcaacgggccaatctttgggcttccattatcacctgcatgtgtatcatattttggtttgtagcatttagtttagctgttattttcttgttttttttattatgggttttatatcatcttatggcccattgatctttcgaagccagattggttagaccacctcagatgtatatcaaatgttcgcttaacttaatctgtaggtatggaaatggatttatatagaagacaaaaagagataaattgcaatcatgaaaacaacgccaatgtaatgcatgcaaaaatttgcccaccaatggtatctcggagaggaacggtgtgataaaccgtaggacagtcataacaagaaagcggagataacatgaactcatgaagcaggtataccttcattgggaaggggcttccgccctgtcaccacataaaagtccatataagcgtggacacttcggtcctgtatactcttcctcacatcaacgaggaagacttcaatttcgggtttcgaccacccaagggcaagaaagggcttatatgaccacccggacaaagcatcaagccaattgttcttactccaagcgccgattttccttagcttctcatcctctggccaggtatttgtcgggattttgaaggtctgttgttcaacgtcgacgaatcctatatccttcatccactgtgcaatccggtgggcgattcgaaattgtcttggtgggtcggaatcacggctcgatcgtatattaaggtctacccaatcatgcatggcgtatgcgctgtatcccccgtcttggttttcgggaggcatggtctcatcgtcgcattttggtttcgggtcgagctcgtgacattccatgtatgcccccggtttgaggtgtttgaatgactgtcgtagtacatgtttgaatgatggcattgccccagtcaagtggccggtatgaatgaaatcaaaataatcttggttccatatccactcttcttcggttgcatcatcaatcaggaaatggacgtttggtggaacctctgttggctgcactggggacagatccgtccctacgatttcggcgtttggaaacaaggccgctgcaagtagacaatttgagatggtgagacaaaacattggggctgggatgggtgatcatacacatctctattggccatattcctgagccagtaccaatatcaaggatcttctttgggtcttggaggggaacttggaatagcttcccgtccatcgccattttgaacatgtgatgttgcatatccaggcgatctatctcctgctcatcattgggatatatataagctaaacattgaattagccatgttgtgcgagacctgacagagccgggactaaacatacctccctcgtggtacctgtgataggttcttccattctcgacaggataatcgattacactgtcagtcaatgactgcgtatccctgttgtgatatggtcagtcacgccagccttttggtaaagcaataagagttgagaagacggaggtagtagtaccagtagtcatcatgaggtgcctacatgatttcacgttagcaagaaaatcgatagttaaaattccggagtatcaataacgatagagcattgacacgttccataagagcactaaactcaccggacgtctagcacccatggtcacctcgctctcatccagcgagatcaatagtggtaggtttgaggccgctctgggggatggacagcaggtaagctatgcctcggtgaagtggaatcaataattgatctcgcgatattccaatccacgtcccagtatgaatacgggaagactctcagactgatgcaaatccagacatgattgaaagggaaggaggggaggaaaaggagcccgacagcttgggttaagttataatctggcagggcgggaggacaatcccgacaactataacttataagatcgacatttgaaatattcgaaaagcaaaagcaaagcccggcgagtggagcagttcgtgtacaaagctgggtaaatggtaaaaagagggtaaagtatatgaaagagatgcccaagcgctttacgcgtgaaatcatccaaagcggaaattgtacccatgtaatgtccttgttttcgatggggaaaaaggtttagttttctaggggaaatgattggacgagatgaacgagagcgaaattattaatctataattattgtttttttttcccttcgtttcaatgttcttttaaattgccaatttcgcttttctcttttgcttttgttctattcagactcccagaatatatacaacctactagcccgtttattttctcctgtacagaatcataacattctatctttttccataccttcactatgttcggagtggggagagttggattgataaaaccctaggattctttttccggtgatccgccggtgatcttccggttccttgacgtggaaccctagatgatacatgttatgtgtccgtcttattcccaaggcattctacccaggacacatactatcgcgattctccagccgatggctcctaggtaagctcgatcgaccaatagaggtcggttccatctagctgggaatatgcaacccgcccagccacgggccgccttcaacctttctgctgggatttgccctttaaatctggtcgatcagcagaatgatttccaaaaaaagttgtgcagaaccctgcagggtcatcctagaatagtcatggaaggccgtaattccccgagggtatgaaatttcttcttcttcatatatcacgttttcgaatcaaaaagaaaagcgaaagcaaaagcgaaattcggcagtgataataatgggttctatactggggaactctcggccccgtagagacgtggagcaattgggattttccctctcaaaatgaattcaaatccgtaaaatcacggtgcccacgccaagacctgtgctgtttgtcatgcatgtactctgtgctcgggtttgactcgaatatcaaagtatcggaataattcccgaagattcacaaattcctgtatgtataatgctcgagtttccttggtgattcttttctccttatgcatgacgactccgactcctaccatattagctctagcggtcggaagagaggagatgatctgtcagaattagcgtggggcgttctaaagcctgggctttctcctacatgcccaaagtggctccaaaatgagagatgaggggcacatagcatcacggaagcataaaagtttccggtactctgggtcttcattttttttcgtttattctctcatgacgtctgaagttccccgcggtacaaagtgtgacctactcgtacatcgtctagacatatgaagtacccaagtccccatcccgaacttttaggcctaggaatctttcattattactctcgtgcacatgtcgatcataaaaaggcgtgattatagcgcatagtatggcttgtagacggaaataacaaatgtgaccaggtatatccccaatttcaagtatgcatatccaaaccgctccaactctgctaaatacccaaaagatccgaatctgtcaaatcatggtgataccctgattcaaagtaattgttgtctttatatattattatttgaaaaaaaaggagggggaaaaaaaacgcgttaacaatgggtcagtagcccaaccttgcagatagaatcccaagcacagcacccctgcagctgtcccaaaaataatatttcgctgccatggagccgggtttccatccgaagggaacccccgggaatttattattggaattgaaattcacccggacccggcgactgggaaagttgttcgggttccaatgcgtcggtagcgccggctccagagccaatttcccaaaatttctagtcggtaactatactctgtacatatatcttctttaatggacttttcaagcgtttttcctccgctagttgcctaagtatgtcaacgcattttttagttaaactatgtctctctcgcacaacggtagatgcacggttcagtgttcgccgaaccacaaatgaactgctaagtcgtcactccacagcggagtcacttgttagtggggacagcccttggcggtttatctcttttgagatccgtgctttagtcgttggcatttgaatacccactatatgagggacttatacggagtatgtaccatggtttccttggtgtggggagatagggcatcggaaattgcaggttcacaaccgaacaactccgaatacatacgagctgaaacacatgttatacaagatgccaacgctctgaaaatcggataatagcctatcggattcgagttcaagactagaaacaatataattgctttagtatgtaccagtacctagctggtagagttgtacaacacatgttggaaacttcagtcggctaatttgcattggactctaagaagagaaagagcaagtgacaggcattttgagaataatgtatgcagcgggaatcaccctgagctgtaccttgctcccgccctcggtagaataccaactatatacttctgatgtagttaaagcctattctatcacgagtatcttgaatcatagccttaggattttcgccaaatgtacttattactactccgtacgtgtcatgcatatagggtagaacagctgcctgctggcgaaagtatagaccgcttgggtattttcacatatatttattccccacaaataacatcacttgattttattggttgcgggtaacctgtctttccgtaagaattatcacttcacgggcgacctttttagcagctagagttgcacttaaaggcgcacgacaatgcagatacgaaactagccaaaagaaatgcaagaaaaataatcatttccttgttatatccttgaacttgataaccgacacccaataaaccacccatcaaccatcaacctgctatgcatgtaggtgcggggtgaattattcacagacatgatcggctagagatccacatagttcagttcacaccgtcggcgaagaaaatcccaacacgttgtcatctttttacagattaatgtggaacaaattttttagacccctccatcgcttagagaaagttaaatatatttggaattggaactacatgttatttgctgatatgaatatgactggccttgggtggaagtcaaacacccaatcggcacggctcagaactgaaaggtatgagcactacaactgtcagacgcaggcgagatgtagatcatgcacgtctactccgtacagttggtctagagaggaaaatcatccatcaacacccaagccgcctaccaatgagaggttagtatccgaatgttgaacctggtattgtcttgttgactttccctttacggcctggtctcattcagaagatttctctatgttgtagcctgtaggtcgtgctccagaagggtctttcttagctctaggataaacgggttatctccactgctgtggttctattggctggaacgtgtccatcttacaggaacggtgcgaatccgcgagggacaaacaaagagcggctgggatacgacgtacgtaatatagtgggttgcaatataacgtaatcggtaagcgagtggccactgtaagcgagtggccaccccacccaagaggatannnnnnnnnnnnnnnnnnnnnnnnnnnnnnnnnnnnnnnnnnnnnnnnnnnnnnnnnnnnnnnnnnnnnnnnnnnnnnnnnnnnnnnnnnnnnnnnnnnnnnnnnnnnnnnnnnnnnnnnnnnnnnnnnnnnnnnnnnnnnnnnnnnnnnnnnnnnnnnnnnnnnnnnnnnnnnnnnnnnnnnnnnnnnnnnnnnnnnnnnnnnnnnnnnnnnnnnnnnnnnnnnnnnnnnnnnnnnnnnnnnnnnnnnnnnnnnnnnnnnnnnnnnnnnnnnnnnnnnnnnnnnnnnnnnnnnnnnnnnnnnnnnnnnnnnnnnnnnnnnnnnnnnnnnnnnnnnnnnnnnnnnnnnnnnnnnnnnnnnnnnnnnnnnnnnnnnnnnnnnnnnnnnnnnnnnnnnnnnnnnnnnnnnnnnnnnnnnnnnnnnnnnnnnnnnnnnnnnnnnnnnnnnnnnnnnnnnnnnnnnnnnnnnnnnnnnnnnnnnnnnnnnnnnnnnnnnnnnnnnnnnnnnnnnnnnnnnnnnnnnnnnnnnnnnnnnnnnnnnnnnnnnnnnnnnnnnnnnnnnnnnnnnnnnnnnnnnnnnnnnnnnnnnnnnnnnnnnnnnnnnnnnnnnnnnnnnnnnnnnnnnnnnnnnnnnnnnnnnnnnnnnnnnnnnnnnnnnnnnnnnnnnnnnnnnnnnnnnnnnnnnnnnnnnnnnnnnnnnnnnnnnnnnnnnnnnnnnnnnnnnnnnnnnnnnnnnnnnnnnnnnnnnngccaactcagtaatcaattgagaagcttcctgaacagagaggccttcatcggcaggtatctgcctccgggatctagtactttttgcttttgcttctcgttggcagcgcgtaattcgcttacttctttctcaagaaaagcggcagattgcatggtaatctggcaggcttttaaaacctggttaattgccgaactaagcgggctcggagggcttcttgatctcatccgaagcaatgctttaatagacgaagcttgcttttgtaattgaatgtagtttgatggcgtttttgggtcccaatcgctatcccggcttaggggggggggtaggtgttcgaagacaaatattcagctttgaaagtacccgatcgggtgaaaaaggtattaaaccggctgctgagaagctatttttaatcgtctccgatttaaaagcttcaattcgtacagaggggtatgcttcgaggaatttaagtttatcaatatagttgatcccggtccgcattttcatctcaaccaaccggccgtacaaccgttttaccaccgcaaaacaaccgatatcgagaggttgtaaaaggtaagaggaatgcggtggcatacaaattggtataatatcgttttccttacaaatttgatcgaattgaggggttaaatggcttccgtggccatcgagtaccaaaagtcgataccttcctactatacgcaataaagttaatggtataaagagtttctgaagccagcgaagtccaatttcatctgatgtctacccatttggactaacttcaaagcgccagttactaggaaggccttcgaaccatgattcaaggaagaccttgcctttaaaaataatacacggagggaggacccatcccgccgcgtttatacattcaattgcagttacccactcgcgatttctaggttataaaagtgatctccgaccgtagtattcacttcttattatannnnnnnnnnnnnnnnnnnnnnnnnnnnnnnnnnnnnnnnnnnnnnnnnnnnnnnnnnnnnnnnnnnnnnnnnnnnnnnnnnnnnnnnnnnnnnnnnnnnnnnnnnnnnnnnnnnnnnnnnnnnnnnnnnnnnnnnnnnnnnnnnnnnnnnnnnnnnnnnnnnnnnnnnnnnnnnnnnnnnnnnnnnnnnnnnnnnnnnnnnnnnnnnnnnnnnnnnnnnnnnnnnnnnnnnnnnnnnnnnnnnnnnnnnnnnnnnnnnnnnnnnnnnnnnnnnnnnnnnnnnnnnnnnnnnnnnnnnnnnnnnnnnnnnnnctcgtttacagtggccactcgcttaccgattacgttatatcatgaagatcatctacggagtatacaacatatacaatcaatatgtccatttcacctgcttggctctttttggaagacagcatatcatcagaaaactagcatagtcttgttgtcattctattatatcttctacgctagtttggtcgattaggcttcactgtccaactacagaaatatcttccctatatcttaagcacaatactgtcttctgtgggtacgtggctatatttggcccattagctatggcgcttcttttgttttgttttgcctataaaagtcatgtctatcggagttgcggtcaacacgaacaacggggaagatcctcaagtggatatatatagcgttcattccgtcattcactacagaatctaagtgagacttccatagattacgcatgcttagcccagcatctggaagcccagtatctggaacaataaggatatcagcaaataaactttaaactagttatggcaggacgcaaacagcatacttcccaattaggttatattgatatcggcaaggataaactaaataccgacatgacgcatcttgtgatctggagaccccaaatgcagtgcaccaacaacaagcaccaacaacaacatatttctattctgcaaatatcatttcgaagcattagcggtaattttgaattttctcttccttgatcctttgtcccattgactttctgaggaggacggggtacagaaacatcaatttgagtgctgacgcgcgacgcgcgacgcgtaaggcatcggattttaccttctaacaattctgtttgcaatggtacgccaaatactagctcgttcctcaaggagccgggtgacgcccgcccgtcaaccgaagcgtcagagacaggcagacgatcatgctccagatatctatcaagaactgttggaggaggccgaagatagaaatcctggtcaatatgattcggacagaccaatcaaaaggcacaaggccggagataggaaagctatccctgtgggattaggggcttcggaacaaacacaccagggctcagaaaaaaaccaacatagcacccaactagtgcaaactgcttacgattcatcgacatcagaagaatcagacgttgattgggaagacgttgaattacagcaaccgcctcagactttgtggaatgaaaattttgtgcctcaaggcgacgacgaggtgctccagatcaccctagagcaggagcccgagaagcacaaaaaaatgatccaaagaaggaagcccttaactggagccgagagaaaaaccagattggatgtgcacaaatctcatatcctttgccttcttggtcacgtccagttgcgcaacatgtggtgcaacgatgaggaattacaggtgagcgttggctcacatgggatatcgattgggggactaacagcatcataggaattcctaaggaagacactgcctaagaaagtagtggcgcttctgcatccaaatgagaataaaccacattacaacagatctaccacgtttatggacggcctcaaccaggctgcagatgccttcacacgcagatttaaggttactaaaccaggaatgaaacgggcccactgggcggaagatgaatatcaattgaagcagaaattggtatcctctacaagtttttccatcaacaattttccactgacacgaatatgtaggagtcaatcatgtcgaatgctgaagtgtttctatccaaaggagattttcgaacccaagcgaagacaatggaaggctcccgagactttggggctcagctattctgtgccctattgcggtctgtagccgtagaggcgagacttgtttgctcattgcaaccgttgccattttctggcactttgaaagacatgacgccgtctaaaccaaagcatccatatattgtgatatcctcagacgatcatggctcctcagcagatgaacgaaataaggatgaaaaaccacctgcagcttcgaggcctcgacggattggacagcctagattcacaccctcgcgccccccccaaccaaaattccattcaggcatgtcaattccagcgattcctagtctacgtccaactaacacgcataggtccgattgcaacatcgcgagactcgccatttccggtattttgggtggaagctttcaacgaagctgcgcagaaatgggtttcaattgaccccatcgtaacaaaatcccttgctaaaccttcgaagtttgaaccacctgcgagtgattcattgaatttgatgaattatgtggttggtttcgaggacgacgcttccgcaagagatgtcactcgtcgctatgtaaaagcatttaatgcaaagacgcggaaactgcgcgtggaatcgacacggagcggcgaggagtggtggaataaagcgctaaaggcttatgaaaagcccttcttcgaggatcgggatgcggcagagattagtgaactaacatccaaatcagcagctgagcccatgccacgcaatatccaggacttcaaggaccaccctatctatgcgctcgagcgacacgttcgtcgcaatgaagtgatccatcccaaacgcatcattgggcacgtggggttgggaaaaagcgtatcgcggagtgagacatcagaacccgtttatcgtcgagctgacctgcatattgtgcgaagctccgataaatggtatcgccttgggcgggacgttagagttggcgagcagcctctcaagcgtgttgctgtaagtcgaaataaagccgggagcttgagtgacgatgaagatgaaaacgagtctcaagagactacactatacgccgagttccagacggaaatctacgttccaccaccagtagtccaggggagaatcccgaagaacgcatatgggaacctcgatgtctatgtgcctagtatggttccgtctggcggagttcacatcaagcggcgggaggcagttcgagctgctcgaattcttggcattgactatgccgacgcagtcactggatttgactttagaggccgtcgaggcacggctgtattcgggggaattgttattgccgtcgaataccaagaagcgcttgaggaagttttgcggggtctggaagatgagaggcggcatgctgcactggaggcaagaactgcggaggctctgcgattctggcggctctttttggtgaaacttaggatcgcagaaagagtcaaggaatatgctagcgataacgaagaacaacagctcgaaggtatcgaagacgaaatggatgttgaagatgctggtggtggtttctttcctgaaccagaccaaccagccaatagcccgtctctgaaagtcctgggaaagggcaaaatggtacatgaccagaattttcccgaagaatacacggaaccagagatggaaccgtcattgcacgaggaggattatattcttggaggcgggtttctgcccgatgatcatgacccagctccgaacccagtggaaccccccaagcctgcgcctttggccgtaaacccgacatcgattcctgagattattgccaggaaaaaagcattgaagacccctcgctactcactggtggttgtcccaaaccacggcttaaactcgacatccgtatccggagtcctcgcaggatcatctgacaatgttcctatcgcagtggattcatccacaaatggtggctccaaatccgcaagtgtggtcactatctcccggccaccgtcaccagtgcccaattatgattctgatagcgagatcgagaagggttccttgctttctgaggaccctgaagatgaggatgcaattcccgaatggctgatgtctgatgaggactagtttttgatagttagacctgctgtatgctatctatgtacgctgaaaatcaaatattcaaatgaaatattcaaataaaaccaaatcttcagagctgctgtactgcttttggtaacgccttcactaccatttgtgttttgtatagatcacatctcaatcacggttatgtatcattatagcgcaatccaatacaacagcccggccgggctagctcaatcggtagagcgtaagactcttaatcttaaggctgcgggttcgacccccgcgttcggctattcctaaaaccaaacctgagatttctttttttgcttgttgttttgcttttttcatcttccaatttgaggattagacagtccagatttgggataattgcattgttcttttagtacgtgtcctaaactccattgtaaatgcaagggggtggggtctactccgtataatgcacgaaccaagtcgatattagcgacgcgtcgacgcgaaccgccttaggcatctctctcatcttttaccgttaggcccccagtccaatgtttagccttgaaccattgctgttgcgatgaaagaaccaccgcctgaagctagaaacctgccagagactcctcgaaatcagttccgcactccgagaagccatagtccacaaggtcttccaacaactgccacgaaaaccaagaccgcacggaaccgaccaccacagtcatcgacatcggcaagcattcgtaagcgaacatcgctgccacgagttcagtctactctcacgcaaattgactttgtgacacagtccacaccttccaatgatgaccagcttagctacatcgacgaacacaaacgtcgtgacgatacccacgacacaactgagcggccaaatgtagatgatgagtccgacaaggaatcggactatcttcctgctccaccacttcggtcggcccgtatctcgaaattcagaatgagcgaacgagagcacgattcggatgaacgcccgcagaagcggaggagctctggattcgctagtcgagatacacaccgaagtgatggaccacgaaagagcgaggccccaagggcgagtattcgtcctaggggcggtcgaaaatcactagagaagtcagcggggaagcgggacaagaccttaactcagatggactttgtacgacgttacattaccatcaacgatgatgatgacgatgtgaacatgggatatattcagccgacaccgcagaaaaagggcatgaaagatgaaccaaccgagcacacgccgaaattgaatcaaccacaaactacgaagcgtccgacctccaccaaacgaaatcgcagagctttggaagaagagctggatctctcgacgggcgaacctatatcccagcaaaacgaagcacaacagtcaaatcctggaagcgaaggtgagggcgagcgggtatctgcagctcccgtgacaccgcggaagcttcgcgcgcgcgagataccttcttcacagacgcctgaaagccctggactcgctattataacctcatctcaatttcgcagcgctactcgctctccttcaaaacgtaacccgctgagtcccacggataattctacgtatcctgtcaaagaagaaaccacggaggctcggcgagtggtcggggattcacaagaccctggaggtgaatctttaccacaaccaacaacattcaattctccagggatctataaccatttgattcaccccgatctgacaactaccgaggaatttccttcatctgcacctccaacggagtcgacttcccaggaatttcccaccgaagaaatcggggactcgaggaatgaacccaccaaaagagagaggacagtcatttatgaaacggacgcggactcagaatacggagactctgaggacaacctcaatggaagttccgtgacaccatcttcaaagaaagcaaaccgaccaattggtccacaagacggcgtacaggggactgaacacagcgcggagttatccaaggatgattctcaagaacttcctctaccagttgtgcaatcaagccctggacccaatgatcctccatccgaaggtccaatgtctgatgcctcaatttgttatcgaagaatgcacgtagctacacaattcccgcacgagccaatcccaatgctgaatacacagaagatggctgagctgttccctcacggagacagtacccagtacacaaacttggaggcatggaggccttctcttcgcaaacaggcgacggggccactcttgcagacacagagccaggaaggcgacaaagagtctactgaaatggtccccgagtcatcgcctatccgagaacaagaacgtggaatcgattcaggtgatagttcgttccaacgacctcgtgttcctggctcagtggtccaagtcgagtcctcacaggcagtggaccgagatcctcaatggcagggccgagtcctctcacggagccagctgctcacatcaagcgtcatggagagcattccactcccgaacttttggatggggagtcaggatagtgtaggggagccttatagcttacctgaaggatgacattgtttccgagaccattattcaatggattatgatttatgaagacttagaatattattcaatatgatcactctaatctttaccctgaagccgctgcccagtgtgtttatacgctgtgcggtgtgcggtgtacgatgtagttttggggatcgtcgcaagcggggcggtcgggtgatggacgaacgcggagacacagcaaccttgtggttccaaagtctttgactctcttttccctcttgcaacttcctaatcatggatatcgcctacgatcacatccaggaagaggcattttctaacgaagagggagccccctcggagtctaagcctcaggagtccaacgctaatctcaacgatgagctacaagagacattccgcgccttctccgccagtccatggggctcccgaattggaggattatggaacaatgtacgcaaacagggagaaacatactacgagggtgctcgccaggagtacgcagctgccagcgaggaagccgtgaaaggattttcagatctcagggaaacactcgccgaccggacaagggggctgtctctcagcacagctgcttggacgggcagtggcgagggacaaagcgacgagatcaccacccccacagctgctgcaggggaagtagaatctggcgacaagagagaaggcgaaggcgaaggcgctggcaccagtggagaaagctttattactcggttgaaggcggaagccgctcggcgactgaaggagattgagaaggcagaggaagcagccgatgaagcgattctgcgattcggaatgaatatcggccagaagctgcgtgaggccgttagcattgtgccgcctgataccgatgagtccggcaagcttcttttcgagagcaaggatgctgagggaaagcgggtcattcatgctacacggttcgaggcacagctgcacgttatccattcaaacctggaaagcttcagcaaggacccagtcagtgacgagtggccttcgttcaagaaggagttcaatgtcgaaatcaagacggatgagatcgccgccgatctagagaaatacccagagctccgttcggctatggagaagctagtgccggagcaggtggaatatgtggacttctggactcgttactacttcttgcgtctcgtcgtggagaccgaggagaagaagcgcaaggagcttttgaagggtatattgagtccatcattacggtgattgttgttttccagttttaataacttctactttacaggtgccaatgccgaagacgaagaagaggtcggctgggacgacgactctgactctgagtctcagtctccttctactccacatgtccgctccggtgcccagactctcgcccccaccaaagaaacccagaaagccgagcctcgccggtcaaacgaccagcaatctcaagccgacagcgaatccagctacgatgttgtgagtggcgctgccagccgtacacccggtagtcctaaggaaaagagtccatccgctgcgaaggcggatgagagcgacgaagattgggagtaactccctttttcttttcaaggaccatcagcaagatgatccaagttggttccgagggcacctgtttataccatataccccctgagagcgtggtcttgctactgcgtgcgccagcttaaacacggctccctaagtatctgctttggttggagtttaggaatgtcgggtcttttaattttggcgtttcgggcttttcccctccttttattcccagctttgttttctgcaacttgctttcagcgagcgatgttatctgtctatgcggttgatatctgaatacacgtcattccttctatttgaacagtatctcaccccgggatctgactatctatagcccctaggtagatatcaactgacatccaacagccgctatggatgatggcattcgccaaaacaatttccagcagaggattcgttcgcaaggtaggaggaaaatgcaccccctatctcataatcatgatcataatacatgtatgtctaaggcaccatagtccacaaatttcccattcatttcctattcattctgtcgcgccaggccctagatctctagcattcagaggcctacccatctttttcgaaagaggcgactcagcatacgcaggcctcataccacgctgactactgggacggacattcggtgagcttttgcgcaccggggtttccggtgtgctttccctggagcgtatgtggaagccctgcgattgcctagtaggcgagtaaggatcgccgccatattggtgggggccactatcgggctcccagccgtactggtaatcttcgccgcggtgtttgacggggctttcattgtaggggtcccagccgacgcgacgacgggcctccgagcgcagccgctggcggtgctgttcgtcaccaccagcgccggtagtggatgattcttccaggaagaagttaaggagctcgtcgctgatggataggtgtgattgttgctggaattgctggagggatgtcaggcgaaggagggtttcgaggagggagagggaggtgcggatgttctcgaagtgagggttggagactgttgttgtggcaggggcggatgaaaatgagtgacttaggggagatgcggagtgggatgaatgccccttctcattaagcgacagcttggccatcatatttgggtcgattgagggtccgtctgcggatggttcaagcttttcagcttcggactcggtatcggaggtttcatcttcgttgtagacttcaaatgcgatccattctgggtccagtccaggaggcagacgccattcttcggggatggagtcttcatgcagataatcgaagctgctgatttctggactgtcccctccgttcagctgtgcatcgagttgagcttgttcctcgtccgctggtccctccgattctgcctgaggaaagtcctcctccacctcgtcacgttccatcatgcgccgtggcgggagagcatttaggtcccgtttcaatagcaacaccggattattcgtttcaccctctgtgctgatattgaggatcctccctgtatctgcgtagaatatctttgaaatttgatgaataggaagaatctcccggattcctgccgtggacacgccttcatagttttcgggttgcggatcattctcatcgattgtgtggactcggccatcatctaggtcttcgatgatcaggacttgataagtgtattcatcggccccggctagtcctggaagctttgtccgtgggcgttggcctggagcttgcaatgcagctattggaacgcgacgcagcttcaaacgtgccttgtgcatgacttccttccacgtggcctcgcgtacagattcttcgtcctgaggtcgcaagtggctggcaaatagcatatacatcgataaggtaaaagttggccctacttggactgcctgagatggggacattgaatattgtgtatcccctgctgtgagaaacgtgcttgcttggagaagtcgggatggcgataccgttgcgggcaagttagtggataacttggccccagaggtggtgatcgccagattcatcagtggcactgcgtcttcaatccgagccaacaaattcttgatatctttgataataagcttgatttctttctcgctgttcgtctgatctttggacgatcttgctcctttgcgtctcaattcttcagatgccgcagctcttcccagccgctgtccgaggacttgaatgtcccatctcagagactttgtgagggcgacagcagattccaatgacgtatttcctcgagcagcactagacaaattgtgagctttctgacaattcaacccagtgtcgggtgactcacatcaactcaatcatgtcaatagctggggcgataacttgtatcttgctttcaaggcgttgttgcaatgatattagctcctctctgtcctcgctcttgacattctggccaagaaaagagaattgatcagcgcctggattctttctacactcaagaagaacgcttaccttgagcaagcgcgacgactgacgcattgcatagctagcagttatcgcaattcccgacctgtgaaggctcttagcattggatggtgtagttcttccgtcattatcaagcataccgaatagcataattcattgcctgccgggtgagctatatgaattgcacgaattagcttctcgctccatcgccagtgacatacgaaacaaaccccagttaaaaaagtgtccattttggttcaagctggaggccaacggcctttgaactttgcagtgtagatcgtattgacaggcatataaaacacccctgagcaacctatgaattaaaccaggtgcttatcgataagagaatgagagctcaaagggaatgagactttccgacaatttgtagttttgaccttgaaagtagacaatggagtgaagtcaaacagttgaaaaggccataagcataagcaaacatgatggtttcgaacaaacaattattcaccttctcacatttaacagaggaaacccattccatataatatcacgtgaaaaagatatcgcggggtcttagtcattcacccgtgcaaaatcaaaaggcactaagacccctcttattgacccaacctgtatttgtccaaatccgtcttggtttggtattttcgtgttaatacgactttagttcttatttcacgatgtcaaaccaaacacctgaatcctgggaggatgagctttcccgacaggctgagggcgttaacctgaacgcacaatctcgccctcaggcccaggcaccctcattccaacccggcgccgcctctttcacgcctggagcctcttccttcgtccccggacagcagtatcaacagtattctggttatccccagcagggatacccccagtatggtcaacaacaggcctatggtggctaccagcagcagcagcaagcctatggccagtacaacgcctatgcccagcagcccggtggcttcagccagtacaacaatggacagcaacagcagcaatacggtggctacaaccagcagcctcgccagaatgcgcctgtagcggcacaacagcaaccccaggctgcagcacccgcccagtccgctcccaagcccgcatcagctgcccttcccaagaccaaggttctgtctatcggcgccacctcctccagcgctgcccccaagaccaaggtcctttcgatcagcactcctaccccgacagccaagcctgctgacaccacccccaaggaggccaatggtgatactaagggccccgcagctgctgaggcaggctcaaaggtggcggccaccaaaagccttgacaagacagacaaggccgctgccactggcacttctactcctacgccatcttccggccgctctagccctggacgttccagcccagcacgcggcgaggcagccaagcaagctcgcgaggtcaacgccgtcgcgaagtcacagcaaactgatgtcgatgaagcaaccctaaaggaaatttacggtgagcggagagagcacgttaacgtcgtcttcatcggtcacgtcgacgctggcaagtctacccttggaggttccctcctgcatgccaccggcatggttgatgagcgtacactggacaaatacaagaaggaggccaaggaagccggtcgagagacctggtacctttcgtgggctcttgatctgacccaagaagaacgttccaagggtaagacagtcgaggttggccgtgccttcttcaaggtcaccatcccgcacccggagggcgacatcgagcgtcaattctccatcttggatgcccctggtcacaagtcctatgttcctcatatgattggtggtgcatctcaagccgatcttggttgcttggttatctctgctcgtaagggtgagtacgagactggattcgagaaaggtggccagacccgcgagcacgcacttcttgcgcgcaacactggagttagcaagttggtgattgctgttaacaaaatggacgaccccaccgtcgaatggagcaaggcccggttcgatgaatgcaccatcaaggttatcaagttcctggaagccctgggctacaagaagtcggacatcttctgcatgcctatctctgctcagcgcactatcggtatcaaagacagaattcccaaagatgtgtgcgattggtacgacggtccatcgctgctcgaattcctgactgcgttcgagctccctgagcgtaaggtcaacgcgccgttcatgatgccgatcagcgccaagtaccgtgacatgggtactatggcagagggtcgcattgagtccggtatcattaagaagagtggtacttatctcatgatgcctaaccgtgaggaggttcaaatctctgctatgtacggtgaaacagaagaagagattccgaccgccaaagttggtgaccagattcgcctgcgtctccgtggtatcgaagaagaagatttcttccctggtttcgtgctctgctcacctaagcgccccgttcactgcgtatctgctttcgaggctaagattcgtatcttggatctgaagagcattctgacagccggtttcaactgcgtcctgcacgtccactccgctgtcgaggaggttactttcgccgctctccttcacaagctcgagcccggcaccggccgcaagagcaagcgtcctcctcagtttgccagcaggggccagaccattattgcccgtctggaggttaccagcagcgccggtgcggtttgtgtcgagacatacgaagaatacaaccaattaggtcgtttcactctgcgtgatcaggtatgtcttctccacacttttttcttaatattgtttcctaacgtatcgtttctagggtcaaaccattgctattggtatgattaccaagctcatcactcccgagaccgaggcccagtaaagtgattttgccactgagggtgcctgaatgtctatattctcaaaagtgcaacgaatcacaaaataaaagcaatgtgcttgtgagaaaatccgaacagggaggtacgggtgggcagaggtcgcgtaatgataccacagacagtccacaactgatgatgatgaacatttcttttttctacatcctttccgcatatagactttgctccatctaatgaatccaagcggttgaaccgtatatgggttcttgggttatccccagtgatattgggagtagcttatgcgagccagatctgatgaacgatcaatcatggtaataaatgcaaatatgtaaacagaaaggatatctatccgacgggtttcctgtcgttaccaaggcaaatcggaaataaaacaaaacgtattcaacaaaagccccagtctacctcctctttccaacaaccttcgtaaacccatcatcgtcaatctcaggctcagcccgctcccttggagcccgcaccaactcaggcgcctcacccatctcagtatcctcttcctcactctcatcgtccgtctcctgatcctcatctgcagtctcaaccctctggaactgactcgcagcagagcgattttggctcttcttgtggaacttctccaacatctgctggatagtgccgaactcgcctcgatccgtctgcgtctttagctccatgatcatgtccgcgacgtccgcagcgctctcgtcgtccaccgccacgtcaaactcgtcgttcatcacttggacgagcacttcctccaggtccacggcgtcggtctcgggtcgatcggccagcatctcggagatagcgccgcaaagccagtcccgcttctcgtttgagttggcaccgccccagtttgactgcacggctagtgaaagggccggccaattgtggagtgtgagagtgatcgcaaggtcgaggtaagaggcagcatctgtggccggttggacggttgaaattgtcgccattttggagggttaagtttatatggttgttggacctaaggtgcgtttgcgattcttttttttttttttgggcacgactgatagcaccccgcggtctcggtggagaaaaagactgacttgctgatggaatgggcaacttaggtttgtgataatgatggaaacagtctctttgtcttcttgggtctcttcgcaatcggtcgcactgtagcgcaattgagttctcttaatactgttatgtatatggaagtttttttttttaaaaaaaaaagaaataatccgattagatattatatagtcatgtgacccgaactcttggcaatattgcctccaaggtttttcgagcttccttccaataacatatgttggagaatattgtgcgattgagttgaaataataaaaaaaggaaaatctccgatagggggaatcgaacccccggctgccgtgtgagagacggcgatgttagccactacaccatatcggatggggactgcgaattactctcttaagtttatttgtgacctcttgggtttagcgctctctgtccgtgtgtgtttccgtgtgtggttcaagtcccttgctcttccccttccatccaacaaccccgattttctttttcgccttcctttctcctacgcctcgcaggtgaggcatttttgccgttggcctggaatcaccgagctcctgagcaccgctatccccttctcccaataggacgtaaaaatgggatagacccacgtcaagatgagattcggggagatatggagtgaaagtctatacattcaagacctgctgccaagtattcaacagaggtgaatttccccatttcgcatcaaatcatacggattctacatattatgagtgaatcaagatgccgaatatatctggtggtgcccactgggttggtggtccgcatatcaatcgatcatttcctaatgcagattagactcggatattagccaatggcaggctacaatgcagccgagagcctctactccgtacgtcgtacttcttgctgggggccgcccccgatgttttggcaccaaaatgtaagagtaaagaaaaaaaggcccgtgtgttcctttagtcgatggtggcgtggtccctggtggtgccgatcaaccgcccctaccctgctaaagtgggtatgcttccaggtcgaaatcttaaaagagttggggccagttgtgaggtatgaaatagaccagactaattccgcttcaatgtataatgtacaatttatcctaacagggccatagcgaggtgtggcaacgcttagttcaaatgtgtctataaatgccactatatgtcaagttcgaatgatgcgaggatagaagaacatagtgtctagtcctgaggggagaaatgtaataaggccaatcacactttcgaccatgcttttcaaaaaagaatggtaggcggtgagtctcaagataaacctgaagtacatcctaggaagagctagtcctaattaggcagtacaactattaaatcaggcatgcgacgttctgcaccttcgtagccattggtccgtgtgcgtgcccgtgcgtggttgtatataatccctccctcgagtgcaatctacgctgctttcgctcgcccagccccgttttacctcagctttcaccatcaacgtcagatgagacatttttgccccttggcttactacgccgaatactgatctgtcgcctctcttatcaatcggtcggtcaattgccgaacttccgcgaaaggttggacgtttgcaatggttgtagaaccgagcagctatatagacaggttacctttcacttttacacctgcttcttctttctcccttcgtcttaggcatcataaatagtatgcacattttaattattatatagatctggcacatcacaggcattactctagaggtcactttcgaaaacgctgtctcggaaagcctaggttacatgtactcttcaatggtctatctaattcatcccttaattcaaagccccgacagctgaagcgctaaatttagtaactttctagtaattcggacgagtttccaaaggaattgattaataaacgcattcacagacagaacagtaagacagaccaaggagaatagactaagaacaaattgagaaaacaaaaaaagatatatctctatgataagcaatgcatatacatacacagagaaaatcttcaaaggcacatcgttacgacttcttggatttagtcaaatagattaagcgaccaccattggcatcttcgattggcagccgggtcacaagaaattgtgacattatcgtcggacagacgcacagtcttggcttaggaagcgaacgtaggtatcgagctcagactagcgacgtagctgtttgggataccgtcttttacaaaagagaggatgtagtcctgtatgataaatgcaatagtctggttcacagcaccagtgtcaactagactataagataaagtcttctgatttggagtatagaaggtgtattagatatcctgtacatggattcccggccatacgtcgaaaaaatgggtaaaggaaccgttattaaaggcgaaattcaacactgccgcattacagtccatgaagatatcgcccaccgtcaatgccgctctctggtagtcattggtataccccttagacccatcaaacacaggcggacagagggacttagtaatatgatcgatagtagagctgttagtataagtgagaatatatttgacgagcgtctcatattcctcatttgtatacaccgttagcaccaaaaccagaccctcatctaagctataggaaatcaaagcctttacagattggtcgtactttccacaacggatcagctccttagggtctgccttcacaagactgccatccggtgtagggccatacatagccgaagtgtacggctgtgagacaccgatttagtttacattcgccgaaactaaaacatcagaaagaagctctcgagcttcagtcagcaacttgacgttcgcctagccgaggtaatcttagaaagtcctttcttggttttcgagcgacctatataggaaataggcataagactgtggcatagcccggttaaagagggctggtgctacccctccgtgtacagtgatatgatacataatagaaccaccgcctgcagattccccaaagacagtgacttatttcttatctcccccaaagcgatagatattgttctagatccactgcaaggcaagtcgctgatcgtaaagtccggcgttgagtacaccaccttccacttcgaatgagggcccagataagaagccaaatgcacctagctggtagttaagagcaacatataccacgccctctaagccaccggcttagctgcgatcaatcaagcccttaggtgatccaaaagacgtcatagacccggcagtaaagcctccgccttagtcaattagcatttctcattaatgaagaatagtaggtgattaccatgaatccaaacaagaacaggtaacaatcttctattcttctggcagttattaaatattttgcgaggcacttggacatccgaaaacagacagtcctcctctccaccggcggagatcgcggacaagtcgctgtaagagacattagggaaattcccagtcttcaaatactcgtttatgtattgtgaggtacgtaactgccaactgcttattccatagggacaggaaatcgactctgggttggactggatgaccgatcggttggttaggggtaacataggagctttccagcgaaggttaccaaccgggggagcggcatatcggatgttagagaagctgtaatgactatcggaatgcttgacttatcattagattttgttgaagcaagcagtttgaaatcgcagcatggtaggatcttatattattcgctccggtcgcctggtagatctcatagcctagatccactataggctgttcctttttggcgcagtcagcgtgaactgcaactagcatacaacccaactataaagtttgtttaactccaaccattgttggtcgcaattacataggttctttagggaaggctctgacccccccggccggtgtatttatatttggactagctggagaatgatggcaagagctaagccgaaaattccctatgtggaactcatgacgaatttatctcgtttaacggtacgaaaaggggcaatttataattgtcagaggccaattcttgaccatgaaggccgaacatgaatacgtgtgtacaagaggatctgcacgaaatcatgcttggcccacttgacccgagaacgaatacacgtatagagatttgccccttaactttcattacatccgccagtggcatacagaattaaaaagcacgtctccagcatttttccaagtaggtaactgtagcagaaagtacctgagtagcagaaacataattcacggactttataccattgctcccatctcgttcaaattgacccttccaggaacatgcgaacatgcgtatacctcgctgggaaacctgactccaaatgtcaccatcactatccacatgagagtcgcgtcgaatacatatgccggccactcattttgtagcaggtatccatcattacccataatgtactctgcaactctgaatatagaccggaccatgatcaacagactgactaggtacagggtattgaggtgccacttccatcgtaaatcttcagaaaagacctcgtgcgttgggtgtctatgaattcggacctgaaacatcaccatgctaacaatgaagaatccgaggaaagcgacctggacaatcagaccaagaatgacaagcttatttccgatgctagcaaggtcactggagatcatcatgccagcggcaccgccctggattaaaaaagacaagacatcgccggtgacaaagagcttggtcaaccagcgaacgggtataagtgaatgtctttcacccttgactgcagtaataattcggcccaaaaccatgtaaatcgaggcagcgaagagggcagggccgagtagtatgaagacattctggatgcaaaagggcatcattcgcccagtcttgtcataagctgacgttcgagcacagtaacctatgaactcaactggtattattagcatgtctcagtctctatgagctaatagtaaatgtccaagtgtacctacagaagcccccaatggcaaagcaaatgcagaaataggtcttcagtttccatattttccaggtgtgatatgcagtcgccgctaggaagagcaagagaaaaataaccgctgctgccctcgaggggacgtaatgccaaagataataacccttgtacgtttgaagttcgggcattgtgtgtgtcaggagcgcgggttggtactgagtgaggaattgcgagctggcgtctttggttgaatgataatataagattgtgattagggttgaaatgttgggaattgaatacttatactctaaggtatgagctcagcagataatatactcgggcaaggatgcgaaaaatgacaaatatccactacagggcattgtctatcgtaactattattagacctgcatcccatgaggagattcctacatactgtctctatatacgcgtatccggtaccagatagagagcaatcttctatggtcattaactaatatacggatacggagtgcagctaacgtacccttactgaagaaagttcgacaacataattgagggacgcgatgttttcctattattgcatattatagtagtaataaagatacctgaagtccgacgtggattggcttataccgtaggttctagtattaaagattctaaactgaaccggaatccttaatcgaggggaagccgtctctagaacctgtggcaacgcgagttgataatggtggctcgtgcatacgcgagtaaaagctttccttgaagatatattccacatatgctccacccattctagtgtgggtcatacatattgccacaacaagctagaactgagagagaaattcgcgtatgcacgggccatcatacgctgccatcatttcagagcccaatcttaataatactctggagtatattcccaatctcaacaaccaaccaattccgtctcgcttttgttgaattcgtgccatcgattctttccgaaatttaaaataccctaggcccctattataagagttaacgatagagacattaggttgttgattcagctaagacttgattcggccagtgcagccattctgcccactccggcccaagataccggtcgatagactggattaagaaactgccaccgtcaccaaaaacccacagatcacgacaggagtgcagaagagctgcataatgcgctagaataacgagtgcttccggcctacggtgcactagcatttcggtatattccaaagaaacaatgattggccaagcgatgacagcattaatattatcgacggccctatcagattgtgcggcattgagtgatgattgtaaagcctcaatcgcttgctcataggtttcactgattgaagggcctagcctggcggctttgataagttcaagaaggcagctgcacgcctgtccgtccctcgtagaattccgcaggcttgcctcagcttcgttcagaatcggcttgagtgccgtctctttgatctgattccaatcttctccaatgactgcgcgtactccgcggtggatacggagatagtggacgaaccgatctagaagcgcttgaaaatcatggtctcgatataccagggtgtcgcatagaatatgaatacccagcatagatgagaatatgaatgcaggtaccgttggcctcatgccgagttccgagtcggtctcatggaacatccgaagtgcatgattctgtaactgcgccgagtggtgtctatacaattcttcctgaggctcgcgaatgatactaaggtgtaaagcagcgagggcaagtagctcattcatcaggtagggagcagatagggcgtggcctatcacttctttatgtaaaaggattaggttgttttcacccttgctcagggaaggcagcgtttctgtagacagatggtagagcagctcagcatgaagcatattgacaggcggatctggctggatagaagaagtagaatctggtggcagcttggtactgggcgattcggttgatactgatggggagattgtcctctttctgctcctcccactggcctgcatgactttgatcgtcatttcgggatattcacataaccgttctgaagatatgcagtttgagcagattggccctttttcatcgcactgtatacagttaggatcttgtctcaacaacaatagaagttctttaccttgatgtggcggcgcttacattcgacgcagccattccgcgacttcttatgcgtcctccgcggcatctgtgcagtggtggtttatcgctaaggaacatagagtatgcctgagagcgggggctatgtatagttgctggctccaataggaagcccactccttaaaaatcggttaagaagctcaaaagaaataagtagaattcaaggaacacaaaatcctgcctcgtagtattgttactgtattatcgtaacttatcacatgatccaccgcaatcggtttaaattcggattttgcccttctgactaatatcctggcaccaacgattagtaagcaagaatgcacgaacaaaagtcacatgagcggtctgtaaaaagacatataattaaagcagtggtatcaaatcttagtccttgacatacacgtatagacgatttgagacccactcactaaggacagcagagttctgcggtttcactgtggatcaccagaccttagtacaatgcctagcgcgagaatctttttttggtcagaacacagggctgtgtgggttggtcctagcgggtttccgtgcatacgcgtatacaagatcacagtcaaacgggattgttgtcactatgggaatgtatgcgcccggaaggcaggcaacttaatttcaagtcatggtatatatatgaattgacattgtcagcccgtcgcgaaaacctcaactcatgttaaattatcgatatgaatatgaagatggcggtcttctcccgcaccttgctctccctgagcgctatttttgttgagatagcgtccgcttccagatgttcgccaagcttgatcgagaagccaaaattgtctggtacttcaatcctcgatgttcaagcccaggaagccctcaacttttctgccgttagccttggaccagggactaacgaaggcggccgatatacaatcagcttctgcaatgttaccgttacccacacacatcctggctggaatgacacaattactactcaagtatggctcccacttgagggatggaatggaaggtttcaaggcttaggtggcggaggctacgctacaggctttggcgaaacttacctaacatacgctgtgtcgcgaggattcgcatctgcctctacgaatggaggcctacctgtggcgaatgggaaagatactatacctacagacctgtcatgggctctgaacagcgaaaacaatgtgaactggttcttcctagaggattacgcatcgaaggcaacgaacgacatggctgtgattggacagcagatcaccaaatcctactacaaaaaacccgcaaactattcatattttgccggatgctctggtggtggaaggcagggcctcttgatggcacagaagtacccggacgtttttgatggcattttagccgtcgctccggcccttgatatacaacgtttcatccctgcaggcttctgggcctcacaagtcatgaaccaacttggagtttatccatcgccctgtgaggtcaatgctttcacggaagcagccgtgaaggcttgcgatcgactagatggggttgaagacggcatcattagctccccagatcactgtcacgtcaaggctgccgactttgttgggatgagctacacttgcgacagcattcggaaaaccttcagtgcttccagcgcggaagttatccaagcggcttggtccggttctcgctctatctcaaagcacgatggctggtacggggtcaacaaggatgcagcgctcggcactgcctatgtgcctaccgcatgctctgcgaaaaacgcatgttactcttttggaagcgacttgtttggcaactggctcaagtatcttgttgctaaggactcgaccttttcaaccagcaatatgactcaggaggagttcttcaaaggcctacgctcttcaaacgttgattattcagggatgctaggaacgaatgaccctgatctctccaacttcaaggcaaaaggtggcaaaatgatcacttggcagggaatggcagacgaagctattccaccgcttgggactattgcctactatgaggaagtgctgaagaacgacccaaaagctcaggacttctatcgcttcttcgaagcacctggtgttggtcactgttacggtggacccgggcctattccgaacggagcaatgtcccaactggttgaatgggtcgagaacggacatgcccctgttgttctgcatgccaccaaaggtagcaacaatacagccagagacctttgcccatatcctcttcggcaaaagtacgttggaggagattctagaaatgcgacctctttcacctgcaccaaataaagttttccttttgaagatttgacctggtcagaccaataatctatagaacttattagcaagcttccagtttgggcccttaaatgaacttttttcttcgtgcctcctacccatcacattactccctccagaagtgaactgaagcaaccctaataaataaatcccaaagctcgggcgattgtagcattagtatacccatatgatagtaacgatacctaccttgaaaaggctatttagcaaaacttttagaataatataatacatcttccacgttttggtaggcaacacaaattttctacttagggtcttccgcagaagcattgtctcgctgcttccaattgaatcggaatctaccaccctaaattagctcgaatttcgccgggtaagctatctgattgaagacttaatcttctcatctaagctgaaacaccatgtgagcagccagtatatatcgcagaatcgctacgtgccaaaagccatgatcctaggtacaaatgcctattgagggttcgtaagacaatttcgatctattttttttggcttgtaggcatcgggccaacattgtggaagaaaagtatgcgccccagacgataacaatgagggtgtagataatgatgacagtccctataggaatagtggtaaatttccatatggcaatagtccctttttggatcgaggtgccccaagacacttttggcgtgtttgttctgaacgagatacgtcctgtctgtcactgtacctttcttccaaattctcaagctcgatggaaggtacagtttcctgagaatcggtatctcgtctactatatcttgcatgttgactcgacgcaaaatcatcggagtcacaaccaacggcagcgatcatatcatgagcaccttgaggctgcctctgagccatcagctttccaccggccagctgcccatgaccccatctcttggctactccccagacattgcaccgaagacgttcgcagttggtggtgctgtattgttgctgccggactatcagatcctcgccctcatctcttttacttcttacatggagcagtccaaagacacttaatttgcccgcaagcactgaactgagtggaaggctgccgtcaattggtttgcggtatatcgtaaagattctactgaactcattgacttttcgcagttcggcaatgcctttctgggtcccaccagttgctcagccgtcaatgccgcctctgtcgacgcattcaaggacacggcctctattgcttcacccgtcggagatgtttcatctgctaagaagtgggctggaattgtgacgtgccaggtcttgcaaagatagaacttgaagagtgcattaattcagaataactaagatagggaggaagaagaagcaagttgcaaagtggaaagcagatagtgaagagggaaatgcacgatgggcagcctggccatgcaggcaagacgaggacgacacaacaacaccaaccatccagggggggtcagctagcaagcatagggatcacatagaccacaccatagcatataatctcctagtacacaaacatctcgcaactcgtttttcattcttggggtgatgatccgtctagactacttgctccccgaaactctacttgacaaccaggctttcgttttctctgcctgaaggacaaggccactaaactaggcatcccgactttccccactgcactagttaactataaattagaaagaatgaatttagaatatcttatactattttatactagattaggttccagaactctactttctgcagaccgacctcgactatacaagcaacggtagtccacagtcccaacagaaagttgtcccaatgaatacgcccgccactttcaagcttcttcgaatcgaaccgaacaatctgcatcacaatagaaacggtccaaactctccccactgcaatagttaatatagctgctacttttcaaacaatgcaaatttcgaatcatctcgctgaactatctagcaaacaatctagctaaagcaagcaagcaaaaagagtatgacgagtggatcgtaacaatcagggggagagggaggggacaaaacctacactctacgcagcaggttcgtgcctgctgaatccgaactatgttatggtaattacctagagtacgtctatagcttccttttctatagagacgagccggtcagccaatcaaagtttatcagccaagtgaagaaagtaaataaggaagtaggtgtttaatttcatcttgcatggctgcctattccagccgatatcactagctttttaccttacgttcatcaattgagctagtaagtttctcttaggtttctcttacttttctcttacttttctcttacttttctattgctctcactttgttctgactcttttgaggaaaaagaaaattcctcccgggacacaattaggctggccacttttcgatggggcgtaatcctgacccttttggtctagcgcccttagtcctgatgtgttcccgtgttcccgtgcgtggttctattaaacccccatttaaccgtaatacaccccatcatcttctgcatcaatcttttcccaggacattctcatctcgtcaagatcgcacatcatcaaccatagatcccatagtagcagcgaacgacatttcatccatcccggaaaggtgtcatattgatcgatttcaggccacgcttcgaggaccttcgcttaaagcactgtcttgtatctttcgttattggtgtcctgctctaaggtttccaccgaagtgcctaacagcgtctgtaggcattccttatcaatgagcatatacattcgatatttattgaatttatcgcgctgaccctatatatcgacccaggccaaagtaagcgcgtattgtatcaagcgaggcaccgtcgaattgcgccgcatcttctataatggttgaactatattgcgcctagattccctagtaaagggcgggatttaccccgggtggcgacttattattccatttgtattccccgaagaatgaccttttgatacaagcttcaagatacttgacgacagtagagaagggggagtcagattgaggggaataggtggtgcgatagataatatatccccaagtccaatgagctttagtttattatatagctcctttgtaggtgcaggtagaggagcgaaagaagcgaaagaagcgaaagaagcgaaacccatcttatgaaagtttgaagaaaggcaaggatgagatgtcccaaaagattcccaaggagaagaagggacaaagagctatcgactttaggcggtcggtctaaccattagtccggaagcccatttccaacacgaccggttacggactgctcctagcttcaagtccaactgccaccttatatctgatctctcttcacctgcgcatctatagctagctcatggtattgctttcagggggccacctggaagatgccataacgtttatacttcaatgttctgatcctcggcatcttaagttattttactaaggtatctagagctttgactccttctatggttctttagataataaatacagcgtttaattgagtgaatggctccatctcaagataataacttcagactttcgggcctccatatagggcagtaaaaagaaaagcaaacaagtaaacacctaggtatactatgcctaagggcgaaggtccagctttataaaaactcaattctatctgtgaaggccggctcgtctgagtcagagttagaggcctcctcctcctcattatcattacctggaggttctttgttcgacgcaatcatggcctgatatatatcctctgctacaatgatcctgctcgtagccttatcagtcccgggagtgctttcgaagtccttaaaggttctttcctgcactaaacagtctggtagcttgtggccggaaatacttctcgacaatgtctttaatatagacttgcagagatattcgccgggtattagccagaataatctgatgttttagtcgagactgccttccttcttgcagtgtatataggtgatgatgaatcggaaatataagaacctcttagctggccgtgcattcccaagaaacttcaattcttttccgtccaggtcctagaaagaggttagctaattgcccaggctcattgaaagaaatattagcttacatcccatgtagtgcatgtcgcgttggcgctgtcttcgtttggaaagcgcttcataactgttgtgtgtcgcattgcttcgtgggctaacacacacttccaacgcgaagatgtcgtgacatcgagctccacaccaagatgtcttgggagtgatagcggaacaacgctggaaagctcactatcacgataatcacgcttgagcttgaataccttcatcacttccttgcgttcttcggaacagttttatgtgatttggcggcactgtcaatctcttccaccttctcgccaaagtggtgcttggtgatctttcgatctaagaagtcccttgagacaacgaggagacgggcgtagaaaggtgctttcgccgaactggaaaccgaagtcatcccatagaccgtagcatcccgcttagagctcttcttgcgctcattgtggatagttgctctatgacaggttagctccgtaatatcaacatagcaagttatataaaatactcacccatatagcctaaagcttgggtagccccgagctcaatgtccgacctttttgcttcgacaatcagtacgttgaggcataaagtctcgtcttcctcgtaccagatcccgtagtctagccgggctccgaggtacacccttttacccttaagcctgactgggccaaattggtaggctctttctgtctggacgttcaggaattggccgtatggcaggtccttcgaaacgataccatgtgcttctagcaacaacgcgtcgatgatccgtctaacacctcagtgccagtgttcgagctataccacattagcaatttcactctacctcttcttctgattcttctttcgagctccatacctaaatgcttagggattggcataggcatgacgttctcaagttcattgtcccgtgtgtcaactttgaggttgaaggctttcaagatttctttgcgggtcaatgaggacaacggaacaatcttgtatggtaaattggcctcgctgatatcgtgaacggtctcgcgaagttgacgttcatcaacatttcgatccagaaaggccttggtggcaagaatgagtcggtcgaagagatgtggtttgctggccgacgctttggttgacattttgcgttgcgatggacttcgtctgaaagactggtgagatctgaaaaagtactggaacgctgaaagtaatctgtcggggactgacgactgagaagaaaatgataagatgaaagaaaagaaaagaagaaaagcaggagaagggactatggaaggcagaaaatcaacaaagtttactacctccactacgcaatccacctcatctcgccctgcttccgggacttctcagtctgtaagctaataagttctggctcagtcgggcttttgggccgtttggattgttgtggttgggctccttggtagtgccggctttattatttagaggccagcttctaagggcaatgatcctgagaatatcatgtaagtagtaaaccatgattttcatagaaactatattggcggacctttgcctatatatatattaaggctaatatatcatagaatagccctaaagatattattataagcgagtaggtctacgaagggcagggtattgatacctattcccctccgataaaccctgagactctagagacccctataccctctactatacctaagaagaagaagataaagaagaagaagcggctaactactataagatttacctattttactaccttagcgcgtaatactctctactagataaaagagggctagataaatcagctactagttagaataaagtggtgagagagatatgtagaaggttttattctctacaacgatcgagatctagtcaaatagctaggtgaagcctggcaaaccaggcaacggcatgtgatcggcacgtggccaccacaacaatatctatacgaaaacaatccaagtttataaatcgaaatttcgaccagacaaggtttagtgccgggaagcttaattgtatgatcttgctccttcctcccctcgactcttctctttcttttcctcatcccgccnnnnnnnnnnnnnnnnnnnnnnnnnnnnnnnnnnnnnnnnnnnnnnnnnnnnnnnnnnnnnnnnnnnnnnnnnnnnnnnnnnnnnnnnnnnnnnnnnnnnnnnnnnnnnnnnnnnnnnnnnnnnnnnnnnnnnnnnnnnnnnnnnnnnnnnnnnnnnnnnnnnnnnnnnnnnnnnnnnnnnnnnnnnnnnnnnnnnnnnnnnnnnnnnnnnnnnnnnnnnnnnnnnnnnnnnnnnnnnnnnnnnnnnnnnnnnnnnnnnnnnnnnnnnnnnnnnnnnnnnnnnnnnnnnnnnnnnnnnnnnnnnnnnnnnnnnnnnnnnnnnnnnnnnnnnnnnnnnnnnnnnnnnnnnnnnnnnnnnnnnnnnnnnnnnnnnnnnnnnnnnnnnnnnnnnnnnnnnnnnnnnnnnnnnnnnnnnnnnnnnnnnnnnnnnnnnnnnnnnnnnnnnnnnnnnnnnnnnnnnnnnnnnnnnnnnnnnnnnnnnnnnnnnnnnnnnnnnnnnnnnnnnnnnnnnnnnnnnnnnnnnnnnnnnnnnnnnnnnnnnnnnnnnnnnnnnnnnnnnnnnnnnnnnnnnnnnnnnnnnnnnnnnnnnnnnnnnnnnnnnnnnnnnnnnnnnnnnnnnnnnnnnnnnnnnnnnnnnnnnnnnnnnnnnnnnnnnnnnnnnggggcaacggccacgagggccaaggcaatcgtgggaagggcgcttcccaaaaggtatgcaagctggcaaccatgtaacattgatgctaaatcatggtagaaacgcaaccggggtcgctgcggtgtgtgcggtgtgcgcggccaccgcacccacgaccattggcgatatgcccaaggcagcgccaatgccgggcaaggagccccagtaatcaacatcgctgtaagaagccattctttgacaaacttaaatctagaagactgatactgactgatggacataggggtcggttttcggtggggtcgcgggagtgggctccaccaccaccaatttggcctggggtcgtggccgaggccagaaccgaggggggcggggcggtgggtggagaggaggaagaggaagaggacgaggggcgctgttgccaaggggtattgcaggccaacccgaccgactggaacagctggaggctgcattggcccagcagcaggagaccattgctcgcctccaacaggagaatgccgagctgtcgcgcctgcgactccaagaggggagcgcagagcaggccaatgaggagccgactgatgctctctctatcacagacggccttgatgccgaattcgaaatcaacctggatctcgactccgacggagaggagatgaagtagagtccctctcagtagatgtctcgagaattgaaactttcatcttcggttgcaattgccggttacttttttttcccccaatgatcttcaatgtaagttcgatataatgacaagtcggttattgtacgcggccttcttggtaaatgcacacccgtggggcgaggcattagtacgaagtatcgattgtggatctggaacaagtctaattaaaattaggacaccatttaattcacgtagactgcgtcatcgacctcctgggaactggcggctggcaactgcacgcctttccatcactagacagatcagatgaaaccttcgggagatcaattgcctgatcggaataattattggaggatctcacaaacaacgccgtggatttgcctttggatacgccttcacacctggaagatgatcattctgtcagcttttgagtgcatcgaggaatgcggtctgtttcggggataagcgagcttcggtgctatttgttttcgaattgaagtgcgtagacttgggcaggggtcgtaggaaacgagcggatttgtggtcaatatcagttaggtgaatgaattggttatccctgcatttggtgctgagtatgcctatgcagtatggagaggaattgtcttcatcaagcaagttgactgactggttggttggtcggagagattgaaagtctgaaatctgaaaatgcgaggactgaagcacgaggagagccctcctgccttcctaactagtggtttctcgcttccatctcatctttcccacactttcatctcgctcttcacacttccgaaactaccatcaacagcattcatctacatcatgggtaagcaaatccgcgaacgtgagaccgtcaactcggctctacctcctctactgatgacagatttccatacgagctccaatgccgtacacccacttgtttacaacggcgacttgaatcattggccaaatttctttcagaatgtacgagcaacaatggataaccaacattggagcagcagcgttatcggatacaccctgaagacccacaatcttgatgacaataaggactttgtcggagatgagacaggtgtacagggaaggtttcaacaggcgatcggccaaacacttggacaggcgtttgaagctcaaaggcttgatatccggtttgccgattccaaatgtcttcctaatccagggggaaaagtcccagattgtactatgaagacatcaaggaatgagttgaagcttgtgggtgagctgaaggtgccgtgggttgtccatcaccgtatcgagcgtcgcctaaagttcgagcccttctgccaaaattctcattttcgggtcttagtgggccagattctcggatatatgaaagagacgggggtgtatgtacggctttctgtcgaattatgaagagacgatctttctccgacaacgccacgacggtacgacatgggtcgtggattgctccccagtgattctggcgtccaatatctacaccaaaagatctccggtggtgaccgtgagagaatgctttttctatattgcgatcctggcgcgtgggcaaggcaaggttgataaccaactacctccaaaagctgggtggaatcaataaaatagggcacgagaaaactccgcttcatttatggagctgtgagtaagctcccctctcctaccaatgtagagaggtgtgggtatctctgaagacaaaactccccatgcgagtggatccctttcctttgtcgaatgtgtgatcaagtgtatagaagtcttgacttagcgctccattcagtcttcaatgaaacttgtcaacctactcaaatttcctcgctgctttcaatctgatttactatctggagtagtcgtaaacttagggaatcgtcaattcatccttgtaactccctgagtgtcagggccgccctctgaaccttcgtaggctgaccgttccttctttgggtgttcctattctttctcccttctcaatttagccgccacttgatatatagaccaatggtctggtcgcttctctctatatattaggcgaatacagtatgggattcaaagagtgcatgggccctgctctcgttgggcaatcatctgaccaacctcgattctcaccctacgcattcgacttgcaaccggtgatctctcccctgctggactaattcttcccacaaaactccacgtttgtttcatccgacaaaacatttaattgcaacaaattggcagcgacatgatcgatattctacgcctttttacgcttcgacttcatcaatttgagggttttcatactggcctgagaatttgcgccgattacaccacctaaacacctagcccgtctatctaggaatcttcgccaaagcagtggctcatacgcaaggtaaacccgggacccgggggccatggtagcctctgaaggacaccgcctctctgagatctgccaattttgggtccgctttgcattaagaagggtcgttatttcaagatttttatgacgcaaatgccatggaggcagatggattagcatatttgcttgcttcaacagcgggtgttttaccactatcattgccatcatcgtgatatatgtgatcaactttgacttccattggacttttacagttctcgaggacttgattacgtccagtatgcagtatatcacggagactgacatgcagcgttcaacctcatccatcgaaattgacatcacgctctaaacggcgaatcggtctatcacacaggtagaatatggaggcaaaattaggattcggacctattatgatgggtctggatcagtagatattactctgtcaatgtcagcaataattccttgagaatggcatttttataaaggccatccctgctcataggcttccaggcggtgccggtccgaccatcctaccgattatgaattgatgagacaccgtgtttgatgttttgatgtttgttggcactggagttttacgttttccgaagttgcttggcagttagttcgtataatcatgaatgccgtagaattgtattatagcataacttcttcctattgatatcaatcgaatgattccttagtttcgaaaacgtggcctatggataagctttaggataaacagagtcgagtgtgacttatacatgcagagtccagaaatttcggctacaggcctccacgctattagataagatctggaacatctccattgttatatttgagagcaaaagagcctactggaggaatattaagtgaactttgaataggtggaaacgtaaattcggagatcgttaagaattggattgatcacgaagcaaaatcttggaagacaatagaatattactcgcaccttcaaaacaggggagttactccaagaagaaactcgttatgagagatactcacacctcaaaaaaggcggagagtttaccttcgaggatcactgaagcggtacctggatgttctccctgtcatcaatatcaatagaaacctgcctgtatcaccactcccatttatcaagatcctcacaaatgttcccccagacgtcgcgcggtggtggctcgatcaagttgaaataagccagaatgcgatccccccacttgtcgtcagttggatatgaagcgcgaaacgctgagatccatagatcggcgcattctttgtcccatataatctttgtgatatccccccctcctggaccccagccaaaggacgacatatccctgactttgcgttagcatgatctcaaagacttgactccgcacttactcatatgcagcccggaactttcggcgaacgagatcacgttttggtcgctggaatgaccagaagagttccggagtgaggacctgcccggggaccttttgccaaacaagataggttatgtatcctccaggtacaggtccgttttccccttgcgtggattggccatatccaagtagtgaaggtacacttttgcatccaccttggctgaacttcttccgagctttggcttcccgcttttcaaagtgaggatttgcctgttgggctcgaacctccggcaggaggaattctgttccctcatcaggaccttgacagtagactctcatgaaggcgtgattattggggaaatgttgatcgtgacatagatacttagcctcccaaccggatggctgttcgtcgggatcagaagtaggctcacgcactccatcgactctattctcataaagcttctcgtcgatcacccatgtactcgcattcagctggagatctgcggagccaggaagggcgatctgagtgcctttgaagatctgagagatatcagtcatcttggagattagatgtagagtgcggaagaaggttgcgaggatgaaaagggaagagatttctgagagcacagaagaggaaaagaaggaaagttcggcattaagtgaagggagatggactttgtggggtcaaatgattatttggtggtcattggcttgcaccatggtacctgaggcaacaccgcactacgaaggggcatagcggcggcagagaaaaaagaatgaccgaattaccattacacactctgtttctcttcactcttttcgttttccttcccacccacccccacaaacttatttcggccagtcggcgagggtcaaagatgatggactggttgctctgcttgcgatggagcaaagtcaacgcttaagaatgtggggatgtggatctttgtgggtcgggaatagcctgagtctattataggaagaggttctctctcactacagcctcatgatgttcgaattaaggaggcaaggtagaattgtattataatgatgatctaccatgtcgattttgaccatagcggggcacttcacagtctcgtcttcttcaatctcatacttgtatcctactccaaacgcttcgagggttcccagctgcagaaggatttttttttttgtaaaataggaagctatgaacgtagttacgacgtagttggtacagattaagcaggcacgatgttgcgtagagggtacatcgtatttcccccagcagcgtaaaattgtattcacaacatcgcagccatggcaagcaatattccgaataccataaacatcgttgatgtgcttcccgcccctagtctacctacctccactacgcaatccacctcatctcgctctgcttccgggacttctcggtctgcaagccaacaagttctgactcagtcgggcttttgggccgtttggattgttgtggttgggctccttggtggcgccggctttattatttagaggccagcttctaagggcaatgatcctgagaatatcacgtaagtggtaaaccatgattttcatagaaactatattggcagacccttgcctatatatgcattgaggctaatatatcatggaatagccctaaagatgttattgtgagcgagtaggtccgcgaagggcagggtgttgatgcccgttcccctccgacaaaccccaagactccagagacccctgcgccctctatcatacccaagaagaagacgaagaagaagaagcggctgaccaccacaagattcaccaacttcactacctcggcgcgtaatactctccaccggataaaagagggctggacaaatcagctgctggctggactgaaaggctcggtatgctaaggagatgccgaggcgacgggcgtccctctgttggtttaccctttttttctctccgagaaccttagcgaggtgagatgaattaaaacggaactttttactaaaatgattcggtgtcgacgaatcgtcgaaattccattgcccaccctgagaatcggcccatacactacgccctccaacgcgatgcgcaacactcgtggcggatgcctcccccctcctattgcacatcgcgatgcctaatcaaggcagagataatcgaactcaaactcacaaggaaggccttggtattttaaggagccctgtctccatggccttctttttacgagaagcttatcgataatcatcgagcccaaaggtggtgccgaggcactggagcatcccggcaagccctgcgcccaagaaatgataacccagagagagtctgcgtcggagatgagcacgggcttcaaggccgcttccagcaggcaattggccaggagtttggagcggtcctggaggcgaaatgggtcgagttctcgttcgccgactttaaatgctcgggttccggatacaaaaaacgcccgatgttgtcgcgttgaattagaattcaaatggactcaatatcaagcttgtcggcgagctgaaagttccttgggtaggcgcatagactaagtgatgcgattaccaacaaccacgctggactcgtcatcaagctggcacagcccctgagagacatgcaggagctgagttgtgagtacggatctcgacatatgacgaaacagtcttcttgaggtaataccggtctcctgcaggggcttgggaggtatggtactccccacccgttcgatcaatcgactactatatcccaacccctctagcctcccagggggctggtagtacgttcactcaggtgtccatgaaacagtgcatgttctatgtatgcagtatcgcaagtactgctgaagaaatagataacgacacagagcattgggtgaagcctaagtgagatagggttcatgtatgttatctcataggactaccttttctgtgaagtactggtgatacgagataatatgaatttcgaagctatcgcagtggcctatcgtccctaccccttcgccaccagatccaatccgacgtatttagatgccggccgctcttttcagggggtttggccaaaccccacatttcataggtgagtacggatagtggttggtcctcaatcttcgcagcaaagcgaaatccagcgaaatgtctaatataccaagtcaatgatctgcaatgttcagatagccgttggggacatgtgcttctggtccttgtctatcctgcccatagcctgaaagccctgggactgcttgacacttgcttttgctaagtgtagtcactgcctcgtactctttgtgcacacggctgcttcagcttggagctctctgacctcccagctactgcggagggtcttgtcgtatggtatctgaacatacattcagatgaagccttcttcagtgggattggcggtattgtggcatgtgaacttcaggacggcgaagggagggccgcccagcttgtcccgctcatcggaggtaagggtctgataatagaccaggcctgatttagctagattatgaccatacagtcacgtgggatttttatgtcccgatggtccatacctacatacagaatgaaccatcattatcttccccagagcttctacagtcataatttacgtagcataggaagttaggatcggtcgctttgctctgcgacacgactatctcggcggactgcggccgccgagatcactggtagatatatggtaacaatcatgcgcttaagctggttggtaatatggcactagtcctaattagatctgtcaagaatgggatatgacccctctaggccctaaacaggaaccttggtttttgttaaggtctagtggtaaattacgctgtacgaaattcgacaagatctataaaatcccctatacggaatcaccacgattatctcccacaataccatgtacaaacgtggtctttccgctgtaaaattctttccgtaaattacgttattaggcctaccgctgtgtatcgttgtgcgtggttctataaagtcctccctatcgcccttcaactttctggctctggctctcctggctgatattaagaactctaacttttctaaaatgacaaaacccgcaatttcaacaatctgtgcggacatcgctaactaactgtaatacacactcttgtatggtatgccgagtaccaatggccggctttctactcccttagcttcctagcttctttggcaatttgtgggtacacctatcttgcgccggtaatggatttgtatcgttatctcttcgacgatctgtgtgataaataattctgtatctactcgtgccgttccgcggaaggcatccatcactaatcaggaacggcgataacggcgaaagggatgattcgacatcgtctttttaagtaaatcgaccgttctcacgtattgtgaatacttcctataaaacgcagagccgcgactaggggtataagaccggctctgatttgcactatggtaaagtaccaaatacaaaattaatctgaattatttctaccaaatgcttctatctcgtaacagcgtaagtcaagtggtccatgtataatcatcctatctctatctaaaatctagggctcactaatctagaaaattatatatacccttctatcagacatgtagttcggcctaggtacgtacctacgccggttcctagtccacagcaaagttcaacgcgccgtatactagcgaggctacggaagtgcataccactaagctattttaggtatgaacttgtccgtagtaccatagagggaacggacgtctctctgacacactctttttagtaaatgtccctcattagaaaatatctgtccctattgagttatcgtccttcaacagaatagtccctaaatctctgtgatatggcttcattagagccgcacaaggttttcctgataacggaaatccttgaactgatcctactcgcaactaacacgcgcactttactcgcatccgctcaaagagtcttccgtaaatggcacttcctgattcgggactcgagcgacttacaggctgccctgttttttaagcccgtcaattatactctaccacgcgggacgcctggaattcgcaacccattgctagaagaatgtatatggccatggttttgcggaagacaagcgcacaaatggaaagcgccgctagtagaaggaggggcgaagatacctcagatcgatcctcagagcgacgaagtctttctccgaaaaggcgcaagctggaaacgaatgttatttcagcagcctcctcgatcgtgtattggatttatagagaaagatggaaaggccgtgaatggtccggcatataccgaagtgaaagttcaaccgaggggtagccaaggctatttacgaatacgtgacgtggtactcccttgtacgaatatcttgaatgaagttcaccctctgctagatgaaggactactctggtacggatttattggtgaaaggcaactaccattgaatccttgggaagaagaatatcgaacagatagcgagaggtacggagaaatctcgaggagccaggtagcatatactacctcaatatatctgcgggactgtgacattgtgttttttattctagaatgtggatgcgttcgaggacaatgggttagcaatcatggtgctaggatgttacattttcggctctgtcgtatttggatgagtcttgtgcctgggcagatttctattccgatgccggtgacctagatttctaaggatatgtacgttaaatgaagtggcgaaacaagatgttcattgaaaaccaaagcaatacatatttttagctaaaaatggtactcattccaaccggttcgctatagagatatcctcaccggcagagctaatgaatggataatcgtgggaggtatgctcatgggtatgtagtggccggaccatataattaggccttgataagtgctgcagcacctggggaattttggtactgttgtccgtattgaatgataatgttaagacatataaggctgttagattggacagttgatgtgtaagtagactacatgaattggatgattgagttgattaagttgcttagttataatatatttctcgttattatcctttttatatatctagtgcagtggggaaagtcgggatgcctagtttagtggccttgtccttcaggcagagaaaacgaaagcctggttgtcaagtagagtttcggggagcaagtagtctagacggatcatcaccccaagaatgaaaaacgagttgcgagatgtttgtgtactaggagattatatgctatggtgtggtctatgtgatccctatgcttgctagctgaccccccgggatggttggtgttgttgtgtcgtcctcgtcttgcctgcatggccaggctgcccatcgtgcatttccctcttcactatctgctttccactttgcaacttgcttcttcttcctccctatcttagttattctgaattaatgcactcttcaagttctatctttgcaagacctggcacgtcacaattccagcccacttcttagcagatgaaacatctccgacgggtgaagcaatagaggccgtgtcttnnnnnnnnnnnnnnnnnnnnnnnnnnnnnnnnnnnnnnnnnnnnnnnnnnnnnnnnnnnnnnnnnnnnnnnnnnnnnnnnnnnnnnnnnnnnnnnnnnnnnnnnnnnnnnnnnnnnnnnnnnnnnnnnnnnnnnnnnnnnnnnnnnnnnnnnnnnnnnnnnnnnnnnnnnnnnnnnnnnnnnnnnnnnnnnnnnnnnnnnnnnnnnnnnnnnnnnnnnnnnnnnnnnnnnnnnnnnnnnnnnnnnnnnnnnnnnnnnnnnnnnnnnnnnnnncgggagcgcttttagttatgtcacatagccgcttagtcatcctgctctggaaaccactgcagtaaataagtaaaccgcggcgtagccactaagccggctgcaggccattaagcaagtaagtaagtaaataagcagataagcagataagcctacccctaccgcctaaaggctcatatagagtatataacctacactactccatacagtaggtcacattaggacagactttggttcgtccacgctcagcaaactataacccgtatgcgtcaccaccccgagtggtcgcttacgggtagctggtacctctttaatactcccctagctttaaagttatagtatctctaaccccttatttataggaccatacttcttccctttttattgagccttggtttagtactgcagtgttacaatcgctatgtttgtatggtttgcatgtttgttatttgcagcgttacagagtgccggctatataagcaggccctctcccacttctgcacttgcttcttctctcttccttatcttagttatcttcgtcggaatacactcttctgttgtatatgcactctttctttattgatcgacctggaacgtcacatgcagcactagtgctgtaggctggagaagcgcctgcatagtcatacataactagttagactgcaacaggttgattgaactttgattgattgattgagataacgccgagtgtatgatcgtatcactactactctgtcataaggacatcctcaccagccgagctactgaattgacggtcgtgggaggtaggcttacgggaatgctctggagatttttttgacagatcagtcagttccggtggctgtcttgcaaaatatgtgatagtatcgtctagccagattagtcaatatttattctgccagctggattattctgccaaagttagccgatgacatttcaccgcattgattcagagaaaacaaccgtcacgtgacatatacacgaggttacgaagctccgcaattacaagtatgaggtgtaagacgtatgaatcacttattctttactcggcaaaaaattacttttgtcgtagtggtctgatccgtcgcccatactgggctcactgtacaatgtacatacctttggtgcagtccatcacccgccgcaccccacaaggctgatgagccgaaaccttatcgaactagtctaggtccacgggtaaatactaaactcccgtctttctttcttctcacaatctcctctcatcttacatctcatagcaccatcacttggttcatcgcagcaataccatcaaccacactctcgccacaccactaccagctcttcagccacgctcgatcaaccccattattaccaggatgagctggagcacggaaggtgcggagggtgcggagggtacagagggtaccgtcagcgaaagtatcattgccacagatattgtgcttaaagagcatcataagctcttcttcaagctcaaaacctcggcgagaaagttcctgggcaaccatatcgaccgacatgagctcaaggaaacaaccgacaaactagaggataagagcaaacaatataagagcgtccaaatctcagaaataaacgtgaagaatgtagaacagtggctctatcttcaattcgatagccatgatatggagatgaaggacgtatagtcgctccccctctccccctaccttagtacgtaatccaagatatagagaagagggggaagctggctaattgaatatagtgaccacaatgggtcctattgagaaggcttttagccaatctagaactactgaagctagtgctcggtgggttattgactctattattcttaacgcctatacgactgccactttaaatatcaaaaatgcgcagccgttgaatatccaatacgagagggattataatttttggcccagttaccattaaacgaaagagggcgattctctctaggagaccaggctatagagtctggtattgtgacgatctgagaggatcgtacttgcccaacggggcaggagcggtcacgtcctcgtacttgcctgtcaggaccccagtactaagaaggctgatgcctgaggtattgtacctgtcagggtgcgtggggaactgtggactgcgcaggagccatatgtgctgcctacgcagcccccttcttatcatgtgacccacaacctatatattatcctcgcatactgcttctcaggagaagcagctattagttctctaatataccactacgtatactcttgtctctatttcccgatcctccattatatacagtattcccttaggcattccatacctaggggtctcacagttctaatagctcttaaatactcggattgcctgatagagactacccctcgttcataccagttcgtatcatatcgaacctttgtaatacaaggtcgcagggactccctataataccgcagcctaacgaataggcttcgaccgattaaacccttcctcccgctataaataatcctcctacagatacctcggagttgacgtaggaaactactatactactagacctaacgctagcgcagcaccctacgaacccctctttattaacccttaattaactaaggaaacgcgttaaagaagctaaggtaagagaggaatactaaaacctccttgtagaattagaaatcctagagtaagcgaagcctcctactctaataagtataaatgactgtattatactataggttattaaaaaatactatatttgtatactaagagagcctataaacgttaaaccattctatagaaatataatctaggaatactatacctttattaaccaatttcagtcgcactttaataagtactagtaatagtataacttcggcctatataaggtagaggctgtagtcgaataactagataactagagaaataataattagcagtcttatataaagatatttaaagagcctgctatctaataagacttctaagacttctacctatatcttataaataatccttaaaatatctaccgagatagtatactagagtacagtactctatagtagaagtaatattaatctatacagatatttataatacagcttaatactatctatcgttatctaaagcacctatacagtcaacagtaccggaaggagcacctctaggctaaagtaatcgatacagtttatactaagtcgttaaaatagcctatagagctagaaacgtataaagcatatatcggacacctttctataatagaaagttaaatccctaactagcagaaatcgctttatatatagaaagagaaaagcgctagtagcggtaagaataacactactaaatcagatctaagcccagatactagtcttagctctcataccttatttacattaggaacaaagaaacgtaaggataggtttaaaaccaaaggtaaggataagtagggcaataaatctaataagaagcgtaagtataataaataaaaaataaatcccaatagtatcccctatagtaactactttaagtatagaaagccaggccactacatagatacctataaagagaccaaaggggattcacaatcaaaaaactgattgccctagcgctcatagtatcggcagcattagggcttaacggtatcaagcaactaggttaaacagcaccttctatatacagacgcaggcctcccaaaacccatcatggctatagacagccatatagtccactcctatagctcctataagctaaatagtaagctataagatagcaggggtgtggtataccaatatatactctcctataaagcagttaaaataacaggctataacctaatcattagattcaattagctagaagctgttaatcctaatattaactagaaaaactaggtatagtattatcgcctatctagtaagaagattaagaagataactatagcagcctttatataagagattctctacagggcccttatacttacagtatatccttatctaattacaaaaggtaagcctatcccactcttcgctatagtaaagggtacagagaaagctttacctatctaatatttagactaggctaatatctttaatcctaaagaagtaggaaagttactaaagagtaataagtataactatactattaagatagaagtaggcaaataaattccctataagccaatctaccctctttctaagatagaacttacagtactctaagattatatcaaagaatatattaagaagggctagatcaggctattacagagcctaataggtatacccattttatttatactaaagaaggacagaaaattatatctatatatagactaccagggacttaatatattaactcttaaaaactaatatcccctactattaattagtaagactatagattagctatctagtataaagatctttatataacttaatttaaaagatatataccatnnnnnnnnnnnnnnnnnnnnnnnnnnnnnnnnnnnnnnnnnnnnnnnnnnnnnnnnnnnnnnnnnnnnnnnnnnnnnnnnnnnnnnnnnnnnnnnnnnnnnnnnnnnnnnnnnnnnnnnnnnnnnnnnnnnnnnnnnnnnnnnnnnnnnnnnnnnnnnnnnnnnnnnnnnnnnnnnnnnnnnnnnnnnnnnnnnnnnnnnnnnnnnnnnnnnnnnnnnnnnnnnnnnnnnnnnnnnnnnnnnnnnnnnnnnnnnnnnnnnnnnnnnnnnnnnnnnnnnnnnnnnnnnnnnnnnnnnnnnnnnnnnnnnnnnnnnnnnnnnnnnnnnnnnnnnnnnnnnnnnnnnnnnnnnnnnnnnnnnnnnnnnnnnnnnnnnnnnnnnnnnnnnnnnnnnnnnnnnnnnnnnnnnnnnnnnnnnnnnnnnnnnnnnnnnnnnnnnnnnnnnnnnnnnnnnnnnnnnnnnnnnnnnnnnnnnnnnnnnnnnnnnnnnnnnnnnnnnnnnnnnnnnnnnnnnnnnnnnnnnnnnnnnnnnnnnnnnnnnnnnnnnnnnnnnnnnnnnnnnnnnnnnnnnnnnnnnnnnnnnnnnnnnnnnnnnnnnnnnnnnnnnnnnnnnnnnnnnnnnnnnnnnnnnnnnnnnnnnnnnnnnnnnnnnnnnnnnnnnnnnnnnnnnnnnnnnnnnnnnnnnnnnnnnnnnnnnnnnnnnnnnnnnnnnnnnnnnnnnnnnnnnnnnnnnnnnnnnnnnnnnnnnnnnnnnnnnnnnnnnnnnnnnnnnnnnnnnnnnnnnnnnnnnnnnnnnnnnnnnnnnnnnnnnnnnnnnnnnnnnnnnnnnnnnnnnnnnnnnnnnnnnnnnnnnnnnnnnnnnnnnnnnnnnnnnnnnnnnnnnnnnnnnnnnnnnnnnnnnnnnnnnnnnnnnnnnnnnnnnnnnnnnnnnnnnnnnnnnnnnnnnnnnnnnnnnnnnnnnnnnnnnnnnnnnnnnnnnnnnnnnnnnnnnnnnnnnnnnnnnnnnnnnnnnnnnnnnnnnnnnnnnnnnnnnnnnnnnnnnnnnnnnnnnnnnnnnnnnnnnnnnnnnnnnnnnnnnnnnnnnnnnnnnnnnnnnnnnnnnnnnnnnnnnnnnnnnnnnnnnnnnnnnnnnnnnnnnnnnnnnnnnnnnnnnnnnnnnnnnnnnnnnnnnnnnnnnnnnnnnnnnnnnnnnnnnnnnnnnnnnnnnnnnnnnnnnnnnnnnnnnnnnnnnnnnnnnnnnnnnnnnnnnnnnnnnnnnnnnnnnnnnnnnnnnnnnnnnnnnnnnnnnnnnnnnnnnnnnnnnnnnnnnnnnnnnnnnnnnnnnnnnnnnnnnnnnnnnnnnnnnnnnnnnnnnnnnnnnnnnnnnnnnnnnnnnnnnnnnnnnnnnnnnnnnnnnnnnnnnnnnnnnnnnnnnnnnnnnnnnnnnnnnnnnnnnnnnnnnnnnnnnnnnnnnnnnnnnnnnnnnnnnnnnnnnnnnnnnnnnnnnnnnnnnnnnnnnnnnnnnnnnnnnnnnnnnnnnnnnnnnnnnnnnnnnnnnnnnnnnnnnnnnnnnnnnnnnnnnnnnnnnnnnnnnnnnnnnnnnnnnnnnnnnnnnnnnnnnnnnnnnnnnnnnnnnnnnnnnnnnnnnnnnnnnnnnnnnnnnnnnnnnnnnnnnnnnnnnnnnnnnnnnnnnnnnnnnnnnnnnnnnnnnnnnnnnnnnnnnnnnnnnnnnnnnnnnnnnnnnnnnnnnnnnnnnnnnnnnnnnnnnnnnnnnnnnnnnnnnnnnnnnnnnnnnnnnnnnnnnnnnnnnnnnnnnnnnnnnnnnnnnnnnnnnnnnnnnnnnnnnnnnnnnnnnnnnnnnnnnnnnnnnnnnnnnnnnnnnnnnnnnnnnnnnnnnnnnnnnnnnnnnnnnnnnnnnnnnnnnnnnnnnnnnnnnnnnnnnnnnnnnnnnnnnnnnnnnnnnnnnnnnnnnnnnnnnnnnnnnnnnnnnnnnnnnnnttacaaaggctggttgaaaattgcggccagcgggagacttacctaaagtagtatggtgggcaacgtgacggtagcaattttcgtgtgtcggtagcatttctctataatagaatagtaagatatataatatagtacttactagtcctaatagatatatttataaagtataccctttatcttccttatataaaagaaattaatatacctaagttagtagatttattatataaacgtataatcctaatcttcggtatactagagaacctagtaagcgatagaggcagcctttttactagctagttttagttaaccttctactttctccttatagttaaacgctagttatctactatattctacccctaaactaatagatagactgaatattaaaactaggtactagagtacttcctataatcgtatattaactaggaataagataactaggtatactagctccctattgcagtatttatatataatataataacttacagtatgaccggaaagtcactgtataaagtattaataggatataatctatctatctaagatagcgttaaagagtaccctaaagagtactatatagatactatatagagggtataagaaatctaagaaataaggagctttataaaagagcgacttactaaggtaaaagagtcgataaagtactatatagataaatattatatagataaatcctttaaggttagtaattaggttnnnnnnnnnnnnnnnnnnnnnnnnnnnnnnnnnnnnnnnnnnnnnnnnnnnnnnnnnnnnnnnnnnnnnnnnnnnnnnnnnnnnnnnnnnnnnnnnnnnnnnnnnnnnnnnnnnnnnnnnnnnnnnnnnnnnnnnnnnnnnnnnnnnnnnnnnnnnnnnnnnnnnnnnnnnnnnnnnnnnnnnnnnnnnnnnnnnnnnnnnnnnnnnnnnnnnnnnnnnnnnnnnnnnnnnnnnnnnnnnnnnnnnnnnnnnnnnnnnnnnnnnnnnnnnnnnnnnnnnnnnnnnnnnnnnnnnnnnnnnnnnnnnnnnnnnngaatatatacctaaaatataagaagctttaattatagattaaaatttagtactatatttcctatacttatatataggtataggcagggtcgttatatctaactagacttaaatactaatagaatagtattaaaaacgcgatagagtagtaaaatagactctgtacttaaggtatcctaggaagtagggactaagtttatagggataaataaagtatcgctaggtatacctatattaggaaccgcactttcctctataatactagtagaagtattaaagaattccttagctttagagatttcccctatattctctacgattcctagggccctaataactttagtaactactataacctctatagcttctataatagtagcggcctttttagccttattagctgtataggttaagcgcttaacgttctgctcgataatatatacttagggtatatgagtatatataggcaatatattaagagcggtataggtagtagactaaacctcagaaggaagctatactattattaataataaattccttcctataataatatagttaaaaaacttatagggatataactatactttatagaagagtagtaagtatatttagtataatctataagggtcttatacttatagtctaagtagctttataactagaaaaagtactattagtaaggtaatagccttttaataagcttagagatttctaaatatagaggtagagttataggcttataacctattaaaagataatattatatttataaatatagagatttattctctttaaaagaagatagtttaggataataatatactattactattctataaatataattaatatataaatataaaaataaggctattttctataaaaaaaggatagatataatattaaaatttcttagtatactatataaaatataatactactaaatctaaagatatatctactatatttactaactaatagtaataccttaattagaataatattatcttaatagaagtataataaaaatttaatagaaatataaattagatatatttactaagtaagtaagataagggattaaagaaaagaagaagatattagaaataaacctaagtatatatatatataatatttccctttatcctaactatattctcttactaataaataattatttagttatacctttatatataggaaatacctaagtttataggctaactaagatactatatttattagagactatagctatctaatctcttagtatagttatataactatactattaccttattatatatactataccctttattatactataccctatattttagagtattaatattagatacctttccctatatacctttttacctttattataaggtttttagatatataggttttaatagactaagctactcccttattttcnnnnnnnnnnnnnnnnnnnnnnnnnnnnnnnnnnnnnnnnnnnnnnnnnnnnnnnnnnnnnnnnnnnnnnnnnnnnnnnnnnnnnnnnnnnnnnnnnnnnnnnnnnnnnnnnnnnnnnnnnnnnnnnnnnnnnnnnnnnnnnnnnnnnnnnnnnnnnnncttgccgcaggaacgactatgccctcgtaccttcccaaaagaacgaacgagaattaagcgagataaacgcaagagtataagaagggaagaacacgcacttagatagtttctctttttcctttcttccttgtacttagaatttggttggaattgcactcttttcctttgaattgaattggctcgtaatataattctaagtactaaaccaactcaacctttagactgtacagctgtataagcggtcattacgaccagttctagcttagtctaaccttttaaaaaaaaatttttttcccttttttcgattataaatatagctcccttaacgagaagctcggtgagctgtggaaagcgacctcttgaagccctatataaagaggatctcgactagctaggcctagctaccctaactcctagcgcctcgacctcgaaccctactataatagaaagtattgagtataatgagataacgaaccttaaagaagaaaatttgatatataatatactctaaggaaccttaaaggaagaacagtttataaccctcgctagttaatataaggacactgtaaaagaaaactaaaaactgattatagaaattgctactctctatactaaggaagcagagacaataaccttaatctagaacttgactcttaaatgcgatgaggtaattgcttacctaaaccttatactataagaaagagactgttatacctactatctcttaaataatgaacctacgacttaaggaacccccttatactctggtataccgattataggagttagaaaaaaccactaagatacctaatgtacctatccttaaggatagaaaggaggtatgattcgaaacttaggaaataattatttagtagaaacttaaggctaatactaactattaccctctccctatctactaaaagatctatatttagagctactataaaggtaaggcctaactctatattatactataaataagtgtagccttaagtaacctataccttaatatttagagccgctgtaaaggtaaggcctaactctatattatactattataaggtagcagacggcaaacgggcttccagatatggccgcaactgcggccgttttaggccgtagatttgccaagcttcgcgccacgcactacttcctctgaccacggccacgcaatctccgcttggcgcagcaacagacacccctcagttttctagcgttccctgagggtgtagcgcctgcatctttggtctccacacttggtactcaggctgcggttttcattcaggtcaacgctgtgtccctcttttctcccaggagccttttccaccatgacacggaaacgctgcgctcagtggaagggctcattatattggggccttcccctgggggtcttgtcggaattttgatatttaatactcaatctgaaagagtttgcctaccttcctatttctttcctggctttccttcatcaagagtaattaccctcaactcctcactggacgattgctcgttcccacagcatggctcgttcccggcgaaaggccaactcatatccgtatgacgatggccatctcagctccgacggctccgacagctcagatgatactggcgatggtcaatatgacacggatcctacagagcctgattgcgaagacgatcagctgaaggatgccagcgatgttgcgcagctctttgcagacaacgagcatttgccagaatactatgtgcagcaacttgagcagtttgacgagtccgtttacacccaggaggattacagcaaaggcactgtatctctccttgaccaagttcatacaagatggaatcagtgagttccagcccttcgttgggaagtctagtacatctgatctttcaatacactatgactaattaaacgcgtcttaggttctgtgcatgtgttcaaaaagaccctcagcaagagttttcgaagttatccgttggtattttgtatacctttttggattgggtattgaatttgcgacgaggtaaaaatggaagacgactacccggaatcaagcggaagagctcgctggaaactttttggaaggtttttcggcttgtttttgaaagagccacatctggcaagattgaaaatcgcatgaatcgacagatgcgccgtgtaagaatccctcttttgccgaatcaaaacaccgttgtccttccaaagacgctttaagtccgcaccgtatagttggcattaaccactcttctaggtcatccgaaaattatcccgaaatcataagttatctcgtaagggccgtgaaaagtccaccatgtacgtggaggacttgacaatggtcgtcgagaccgcgatcagtactacaaaaaagaaatttggacatgggaggcatcgtatcgagctctgcctcttcttgcaacttgctggcctcactgcaaatcgtcctcaggccatattgaatttgatgtaccgtcatattcgagtcagcctgctccgagatccgcaaggtggcccacatagaatcgtgattgagttcaccttcgagttcacaaaagggttccttggcacgaaagacgagtgagtggatatatcaaggacttactatggtcttcagatagttaaccagcatgcaggaacacctatatccttcctgagatcatttttgacccatcgcttgttctcagtccacatgtctctttgctgggcttgctctttggggatcgtgctttcaaacgggtcgagggacaggaggttttgttctctgcagatcagcttcctcgtctaaatattccggcagattgtaatgaacttccattactgctcgatccgtctttagacgatgttccagtattccgacaaacagaacggtcattgcaaggaatgagaatctcccccgacaagcctctaccatactctacactgctcccgtgggttaaaaccattggagtcatcactggatttcgacaagttgctcgcccctacagcttgcgatatggcgctgccaaagcgttggataatagcggtaactcaccttgcatatttatatatcgtgcgcattcacaacttgctaatcatggcttcttttaatttaggttccgtgagcgactctcttcgtaatttgattatgcaccatgccgatactcgcacctttctaaagtactaccttgatagaaggattgataaaaacctacctgccttaattcgcggtctcaatccagacgaggatatcatgcatgcagcctgccggatgagcaggaccatcgatccaaaccggccgcaagacctgacaactgtgcaatcgtcctccgtcaaccaaaggccggaaatcctagcattggtccagcggcgtgacgagcttcgtcaaaaacttggtcgacccctctcgcggcatcgaggcactgtcaaacatgacgcttatagaaagctgaatcaagaaatcaacggcgcgagagaacgggccagaaatgcgttgctatcacagattcaggaaaaatatgaccaagagcaacctatgctagaagttcaacgacagttgtccgaggctacgcttgaaaaagaggtcaaaaccaaactggaacgatcagaggagcttcctctacctcaaaagcgtctgatcgaatgcctattgagtttgccacctccaacgttggaacaagagatgcgtcggcgaactgaagcaatcgatgctgtcgctgcttactgtcaatttgaggaaggggaaacgtgccgtctgccgcgaaacaaacgttttgagaatgatatgatcgagctagataatcctggcaataacccctcagaagatgaagcgtccgagaacatgtctcaaccagattctcctcttgaggctgctttccgatctatcatgaaggatcaccgacctctgttttgctttatttgtctaggacaaaaaaagctggatatgacgaagcgtgtgcagcaatttgcatcgcatggtgatgtttcgaagcatatcaagcgaaagcatcttcaaaaaattgcagctggcaccgtaatctcgtgcaatatatgtgatcaaaaatttgataaagttatgcattttcagcgccatgcaatcgattttcactcgactgtgacggggtcagtggcctccaatcatcaatgaatgacttctttccttggctttgtatgaaccaaaattgaatctagtgtctatgtcatatgcaagctatagctgtaaagttcaaggattggaggtctattggtagtaagcatcagcatgaacgaaaaagctgccttgggaacaaaaggaggcttgagtgctatctagctaattgtaattgcattagacaacatagcctcaatgacgtggcatttgagtctgtgatctgatagcgtgtcataaacataattagaatagatagttaagcgttgtatcttagcattaagggcagataactagaaaacaaaaggttcatacttcaccagaaagccctcgagtctcaatcatactctgatagagagcatgtctaagttctgcgctcaaaaacgtaagtgcacgctgcgatgacttcggaattttcacgtaattgaccaagcagttgaatttgttgggcttgaatggcttaagcttgagattgttttatggctatatctctacgttccacaactgtcgaatgcatccattttcaaggtaagtcctcacttaaatctgaaaaccaacggatcttaaccgcggcataaaagatccgtaagcatctgcttcggaacgagctccagtatgacgagcttcttttggcaatagagccgacaccacattttgatagctcgtcagaatctgccgcaactctcttctttcacaatatcggcacaaaggtcatccaaggttacctagagccatctctatctatggtgcccattcgggttcttctctccgggcatctagacaagcgtcgagaagggatcgtaaacctcaccaggagtgtgaaagaatgctcaaatagggaaagtgacaatctaacgctcgcccacttccaggaacatacaccatacaaaccatggaaccaagaacagcaattacgcaccaaggatgaaatgttccatcaaagttactcgcaccttgctataaagcagatttatgaggatcataaatatacaagtgcactgaaagagataggagattccgagtgctgttcaccggaatacagtttgattcgactggggtttgatcctccaaggtggtgtgctgtggctcaatatagaggagtcaaatcatctgcagaaggaagttctaaaagagcagcaaaacactcagcctccaaatcactttggctgcaaatggggggtgagccgatcgcttagttaaaatatctatacgacaaacccttaaaattgctttggttcttgggctgcctaggtctactggggtttgaaggaagaactgcccttgaagatattcattcaatcgctaatttgactggcttttaccttttccttattgtatctcggaacaaggcaaatgaagtcctgaccgtgagaagaattcacagagatccagagagattgctcaagatagagtagtttagttcgggtcgcttctgcatcagagctgcgaagcgggggcaccgcacaaggagtctcgatcgcgatgcggcataatcaaccaccaatgtgtataaatcatcagccttatctagtccactgatcaagaacaaaagcttgactacaccttcaattcgacaagaatccaagatcatgtgctcaagaacatgaactagcttccacaaagtcaaacggtcaagtgtgtccatgccgtgcttttttgcgaatatatgcagtcgtgcatgtgtaagtaatgcatcaatgttttggcaaatgttttctgtttccctgcaaattggctggatgggtgtttgcgggaagttttctgccagatggtccaaaagctgctgagtactcgcacgggtccgaaaatagttattcttgagcactagaaccttctcgaatgcgacttgagttctatcttcacaagctatatgagccgagtcatcctccaagactgaaatttgatagtccccgacataaagatattgaagtacatagctgaaaatatcctctatgtcatcatggaatccaatggcgtatttagaaaggtcaagtggagagcaaacgcgtgcgatacgtttattgaggacgctggcatgggcactaaattctttttcatttggtcccactttgaaatacacgatcggggaatcaaggtcactaaggaaacatcagcgcaatgcatttcaacatgggaggtgggggctatgagaactcaccctggatgcggtagaagcatgattgatggggaagaaggtcggcaatcgaaatcggggaaaatttgtggcttttaaatagctggccagccctcaatgaggagggactgaccctcagtgagggttggcaattgtaaaattcttgctggcctcagtgaggacaaacgacggaaaggagtgtttcaatgctttaccagaaacgggcttctgaggtgtctgtggttacttgcaaagtactgtgaaatacagtggtattcgaaatctttttacctgcaatctctctaaacctgatgacgaatatcactgtaagtcctcttgacaagagccagatacttcagctgcattgtgcgctccatgatggtaatttcactcgaatatgacagagcttctgattgtcgatacatatcacaatgatctttgggacatgacggtgatatctgtagcttttctcattggtttttgtcgaggtaaatgtgtacaattatattgcttattgggagaaacgaggagcaagccagtttacaatcggacaagcatctaagcttcctagtaaaaaagactgattacagggcttgggggcccagagacagtgaaggctctgtggtactattctgatggcccgagaggatcgaagcccctgttcagcatatgtttgttgtcagaaggccaccaaggctgttagattagagactcaaatctcaggcgattataagaaacatacttgaaggctgatgacatgtaacctgaaatgaaagtctgctcatataagactacgtactagggctcggtgacaccgacccgagggcggtggacacagatccagagacccagtagattccaagaccgcggtctcaagacctaccaggccattagaatgccaacctatatcccctacaatttcacgacccgctaagccataagtctcagagcttaatacacctagtgactcaagactagctcgaaacctgactacgttattctatcgtcagaatcagttgccgcccttcgctgagcgtccgttttcatcatctcggccaccgcagccactttggctcgtgtcactacaagatcttgttgtaggctcatgaggacggtattcgatccatcatccatcgcggctcggacacattgagcagcgctgacaagtcgtaggttcttgttgtagaagcgtgcatgtttgttgtccttgcgggcatacttgtgagctatacgatgtgcttccgatggatcatttgggttgaccggcacttggtccgtcacgtgccatcccccattctcataagctttgaaagtaatcgtgattgcgttgggtggagggttccgacgtgggcggagcgcttccggcagaagtggaactgtgaactcgcttatgttttggcctgaggcgggagcctcttgcgagtcattcttattttcgcgcagcttctttttgttcgccttttgaacatgctctttgggttcctgaggcttaggaacttgtgatgccatatcatgatgggttgtttggccatctgcatgttctccttggttgagcccgccatctcccgtggcccctgctgaattttgaagcgctgcgggtcgaggtgggccagtatattcacctatgatcggacctgaggccgaaggctcaagcaaatcgcccagaaactcgcgaggtcccatgttgtccgtgccctgttcagggtccgaggatctctggtgaccaaaaggcgttaaactcgtggcctgaccgaggatgggcgactcagcctgctcttgccggtcgatttcatcctctcccacaaccattgctgcatccagcccaattaagtcaatttgagtaatggcctttgctgctcgggtgcttcgtgccactcgaccttgccgaacaatcgggtcaggatcctgagttgtggctggcgaattttcattcgatatgcgagatgcggataatgcgtccacagccggtcccacaccagggctgggaagctctaatgaagcggttggctcattcgtcgacggagaagactgcttttctgatctttttccactagtaagcgcccgtgtctctgcttcctgctcaagctcctgaagggcttgatgtattgcatcttgcgcactctcattttcctcggttatttgattcaggctttcgctttccgcctcgacagggctcggcgtgggttgtagatctatttcagaagaacttcctcttgccaaccggtcttgcatcttagcagacacgacagactccacatatgccattgagacgttctcgccgcttcgtgaagagtcttgggaatattgcgaggcggtattttcgttcatatctgtttgtcgctccgcagtatcatgtccatttagatttttacttgatggttcgtgtctagtgtcttccaagtagcgccttgtgccactgccttgaggcagcacttgctcgtcttgcttggaatttggcaatatctctgggtcctcctcaacgtctcttctggtatcgtggagtaaatcgttctgtatcgctaaatgatcatccccaccaatgcgactctcagtataggatcctgccatggaaatttcttcactaccaggaatgacatgagcgaggtcaacgtcattcatatccatatcatgatcaacagtggtggagtcaactgaatcagccggcacggctggatgcaagtcggcaatttcctgtcgtcggtctcggtgtaaatggcttccagcctcctgccttcgatggtgtagttctcggcggtgttctcgacgtgattgtctttgtggagctgatcctgtagccgagaccgctcgtggggtgcttggcaggtcattgactggtacaaacagaggggatctagaaacttccgtttgcagcagctcaggcgaagctataccatggtcttggcgttgcgcccatgtcaaaggcttgtcgaagaaagcaaaatacacgctctgtctgacaaaaaaggaggagataatctgctgccctgttgcttctttggaatgcactttgtctaggaaaaggtgaggtcgatctatcggctgcacatgctgcaatgggggaccacaacgaagggcaagcgttggtgcccgaccaagaacaagctctggagagggcgtagactcgtgagcgactgcggtaccaaaacactccactaatcggtcaatcagtgaatcgaatgtgatagggtcatatcgatagctacccggtttccgggccttgagtagagcttcgcgagcaattcgtcggtcgggggaacagctcaacattttagtgatgggcaaagagtcgaatcccaatttctgtgcgagcgtagccatgttgtggagaactacttcatccgctcttccgcggatggccttggcaatgactttcttgctggtagcctccttagccatttccgggtaatgacgcatagcaaataaccagatttgtcgataggcgagttcaaaagaatccatacttgggcctgtgtggttccgaaagcgcgcctccgatgtctgcacaagacatgtacccctggtcatgtcagggttataaacatgcttcaaggcggctcgcaccgttggctcgttcttgcttataacagcaagttgccgcacaccggttgcgcacgcctcgagatatgcagtatcgcggaaaaaggtgtgaattgaagggatgatcccatcataagtggacattcgattccatattccagatcgttcagtctcaccaaactgggggaagacttcgccgctgagtatatagccttttacttctctcgcatccgcaaaacatgccaccggggctctgagctgaagcttttccacggtatgaatgtcgattttggccatttgatgtcgatcactatccactatagtcgaccagaatctttcaacatgttttaaataatggataaattccttcgtcgttagcaagaattaggtgaaagctgtgggaggcgatgataactaacttcatcgcacttcaatgctagtacacgattgagagagccaatactcaggccattccacagacctggaatgggcaatagggcatcgaaggcagcgcaaatgtcgacgttgtcaggtgacatcagttgtcgcaaacgcttagctttattttctgaaagccgcgcccaccaccgcttctgaaacggtgcattatgctcgttttggtattgccgaattttgcggtatatatttccatcagtgggtgttttctcgtttgcatattcatcgactagtgtatttcgtaactcagtgctaatgtctacataaagtcagaccgagagatttaaagaggaaggctgtaaagtagaagttgtgccaaataaaaaaaatctcaccatctagatagaggtccaccgtccaccattgctcactaggagcaaggacttctgctgctgcacgcaggcggtgttgaccatgaaggcattggatttggctagaggggaaagacaggaacgggtatttatcaggcagactagttagcaattcctccgcggttatttgtgcctcccgacgggcgtgcttcaagtgtcggcgggttacaacagctgtcacatgatgttgtacatccagtcgattgcagccatccttccgaaagacttcgcataatctctccacgttcttttggtccagttgtcgagccacgcctgggtgacatgttatctggctcagagttatcttggcagttccttggtacttcaggcgccgctcagttgtcagttgtagctccgcatccgtgaacatggattgttccatctcttaatccctcgataagtcttcgtcaaaacgtggattgagaaccggccaccagagcgcttttaagttcttaggttgttaaatggccattggaaatggcagggctcgctgcggatggcctcgttgtggatggaagctcgaaggtgccctacaaaaacagtgctactgctgtccccacggtatccaatttcttttcctcaagtatcttttagagactatattcaaacatggaaagagatcaagacaagcggtctactcggtttgatatgctgcaagcccaggcgcatttctcttcgtcggtcacggcagcagaaacgcagcctcataatcctactaaccagccaggccatgctcaaagcccaatcaaataccaaaagagtcctgcagctcagaaagatcgttctcgcaagactctggaaggtccgccaaaaacactggagcttcccaccaatgtcagtaccggagggttggcgaagactctacttatacgaacttgttccccgtgggagacctataaacccatatttacatgtgatcttgccggtatagtatcaattagtgaacaccgtcaccggggctccaaagtagtcgccatacgaagttcgtcaagaatggatagagaggatctactccacaaatatacgcgcttcgatcacatcaacataatttctgccagtgaatgtttcaaggacaatggcgtaaaccattatattgtcgatgacctaccaatcaccttagagcacctggtcgccagcgatgcctatcccagtgaggttcagctggcttccattctcaaacaagtgagtcttaatactgtctttttccaaaggacggtcttgctaatatgagaaaggtcatagacggattgtcttatctgattgaatgcggctatgagcattcgtctttaaagtgctccactacactaatgagtctagacggagtggtgaaaattggtattttacttgacacttcagaatggctggtgaaagactgactgtcgtgatagctagcttggaacaaactgtgccctacacgtcggaacgatcccaatctttgtccctgaaaagcttgggatctctaacaatggaacttatgcagaagtatgtgaaagagaatgtggggatagatgatccagctcggtggcccgtcgattcgaatgcggttgactttctatcgtcgacaacgtcagcaaggtctgtgaaggagcttacaaaggtaagcagtggcaatacccttactgaatcataaacttacagccttcagcatccactcattgcagcatcctgttccaccggcagcttggttgggctagcgcgacttgccattgtctctgcatgcactttttattcctacagagagtgaattttggagatttatttgatcgtatgttctcatttgatgatatttgaatctaattctcttttattcttgtacatataagaaaagaattgtttgatcgacaggtaaccgataaccgtttacatgtaccttgacctgcatgatcatatgatgatttgtagaccatattatcgacttaaacggccttgatctagtcgcaatattatagctcggcggcctgattgatggaaagaaatttctcgagccttaagccaggctcgatgagaaacaacgaaagatcgctcattttgaccaattgacctagacatgagtggtatgtactactaaccagtagagatacattatattcacttccgaattgactcggattcctcggtatctgtaggcatccacttgcatacctccttttgataattcatccctatttgacattcggtggattcactgtaatatgtaccatttgatttccaattatttgcctctttcatgcttattatagaataagatgacttataattgaagctttggctcttcggctatgagaattagttgtaatttccactcaattccggttgtgtccttcgggtagtcggcagtatcggtgttcattgatcggcgtttatcttcggcctctgagaatactaaaggcacccgattcggcgagcatcgtcatgaaagtgatttcccggccggtagggtgaattcaattccttgatgattaggaatgggcctttgcaatccaaacatgaatcaggatggcgtcgagtcgttcgcacattttatgcccacgtgagtgactatctagcatgataaggattttccgtaagtcttcctactaactagcagtcgaggtggttctccataaatatgggaacaggagttgtttccattttactcaatacaccgccatacaatgggaaatggctatattacctatgtataatcgtatctgccctgaacgtggcatatcttgtcatgttcttagccatcagtttgctgcgctacaccctatatcccgagatggcccgtattgagccaagaccaatgagtgtacagagaatttggaccctgccctgggaactttgtgccattatggatcagagcctcgttcacccataatctaggtgcccaggactgagaagtacagtgtgacatagccaattcaaggcaaaggttttgtttccaattagtgagactaacttgaattgtccctcgtcttattgtttagtctcacgttttagccaacaatccgtgcctatggaatatgaaacacagtgctaaagtagaccactcgctgtgaccagagttgcacaacaaatatcttagcagaagttgtcatgttttccaatagcctccaacttgacattcatccgtgtcgccctttgagaatagtctttcagtgacttgttatagaataccaggtctcgatagctttggacccctgtctcggtttgtttcctaccggaggcatcaatttccacatcatcgtaacctttgcctctgaagttgggggagctcctaatggggcggatggctagaggtagagaactgctcatccaggtttgtatgtggacgcgatgtgtgctccatgcactacatagacaggacagagctcccagaagccagaccgcgactggaagcacgagccatctccaatggatcgcaacatatgtgatagtaaccatggttctccctgcggtagtgcctctggtgaattgactgcttgacaatggctcataactgacattgccggtaaatgctccatcacgaattgttttcgacatagcagaggcaacattcttgatagcgcaggtcagttgatcattttctgggcaatttgagtttgtgagatttttgtaaaatatggcttccagtgtgtctgttgctgcataggttcccacgccgtcacctgatctttcgaaagaaaaatggtcagagccagcaacaacgtagccattgaagaggtctgtcacgaagctctcaatggctctcattgcctcccaaccaataccgaagatttgagtcccattcattgcaaagttttcctgcaagtcgggtttcaacgtcaaagcgtagtcaccatccaaagttctgttgatagctgtccacttctccaatctttcttcctggtagactcccatattgaccgatgctttgaagctttggacaagtggctgtaaaacacattcagtggcaatgaacagggtgttgttccctatttctgttgagataccaccaccttcggtaggattttgattggagccggctgcaaagatatactgtatgaccgggaatatgctgctctgatgaacagtattcgagcttgcaagcactgtccttacaacgattggctgagcagcgccaccatctggtaagtaccataatgtaacgccgcttttaagcgatagagtgcaattgggatatggtaccccgaagtcactcgatgcgtcttttgactcaaagcaggtacttttcaattgcgaagtaatattggagcacgatgcacctatctccaagctcgccattgcatcccaggtgcagtttcctgtgggacaagtatgttgcggctttgaccagggcaatgtaggatctagattaaaaagagcactatagacgtttgccttcaggataggatcaacgtagaaggctagtatcttctgtcagcaccttgcaagatattgaagaagtctgaacttgaaacgtactgtcaccaccaagtaagggcccaaccgtattatatccccgtgtactagccagcagtgacacctgggaaggatcttcccggtaatgcggaacataatgaactaagttctggacaaatgggtcaaagccaatagagaatatcattgccaagctaccaattgcggcgaggtggctagaggcaaattgtcagcgtaaaccgattgcatcaggtagctgttgaataacatagaacaatattgctggcacataccgtcctttcactagccatagcaacgctacacttccacttaatcctctgctagctaggtcaaaggtatccagatcagacaaagttcggctctgcctggaaaaccagacccatttcatttgacctaggccgttgctgacagcgaatagcaagcaagccttggatagagtgctgagccaggcaacaagagaattcagcgatatatatttccagctcggttgttgccgcccgttgtactttctaagtacagtaacaattgaaatgatcaaagctgccgacacaaagattccagcagcttcccaggcccagtattcgagaaatgcgagagcagaccgcagctgaccttggttatgcttggtgggatgtagctcgtcctggtcgtcttcctgagcttcgaatatggcttgagcttcagttattggctctacctcagatttgaccggagccattggagaagaatcaggcctcattgggaggtaaagcaagacgtatccgcttcttccctgttgtctgttctccgttggttgttgaatgttgatattcacaaatttgagtctctgccttcattaaaaataaagaacggggttattgtaggatacccataataggggtggttgagaaaaatggggccaaaatggaggctaaaagggtgtgctatcgaacttagtaagcattaacccaagcgcagaacgttccgtctccggaggaaatatctctcaggtatccaacggaactaatctaaggggtgtcatgatctaattggatggctcaccccggctgctttggcttgtgaccaacaatcagccgtggctgatagggcacctgcattagcttgacatgcagtgcgacggtctcggtatttcgcatcacaaaagtaccaaacagaatggctagcttaatacgttaccatcctgtcgagacgatatgaatggagtgataggcatataaccctttaaataatccaccgtaggccgaaaacctcggctgggtttagtaagaggattcagttttcgacgtgaggccttaacacacaatattgtttcgtgatgaaaggccgcagaagcatagctatttcgattttggaatatatcgtgaactcaatcatgaattgatggtcattgtagcgataatctgtggataagccattctgggtgctaatgatccttaatcgaacagatggctcacgcggagcggaattggacttgtaataacttgccgcattccggaaagtacttgcatgtttagttgcattagtttcggagctagatcccatttagtccagtcccgatataagcaccatagaggcccataagcctcatgctgttcaccagctgagcgtacaggatggatcgaaatcagtttcaccatttacacacagactcgttctcaaaccctattccaaaacacgctaatctttatctgacttagctttgcttcgaaattcgaaatgtattgaaagtatagcacgtgataaaaggttttataaattacatgaaatggccttgccaaagatacttccgcctcgcagttccctccccccccctccccggttgaaccacttccgtcatccttgccattagcctcttgcaagggcagtttgtcacgataaaaagctctggcttgcacttgaattgcattgagtcaacctaccacacagaaatattctaggaaattacagcacatccagaaattgctgaaaaaaattcgttatatctaacaggcttcagaacagcgttcgtcagccaggagaatatacgaggctaaatctacctgattgtcccagatgcagtgaatttccccgtgaaatttgaaaacaattaaagaaggtgtggacactagatgcactgtgtttcaggttaggcagggtttactcactttgccaattataatattgttgagattagcagggctcttccgaatgtattagtcaatattatgtgacagctgaactcatcatgaacaacagtatcaattcaatgagaccgtccaaattgcagactgctgagaaacacgctccaaaacagagaaagcattgaaatcatgatggaaagcgggatagatgggttttgtaagtctgtgccaagtcgctggggtacaatccatgccaagaagaatactagcagtggtgaaacacagacgaaattgtagaaaatgatccaacgtaggcttatgatttcgcgcgcatagatcccccagaaatcttctcgcttgttgcccgcttcttcgagttcggttttcttctttgggaggaacttcaggatgtcagaggaatgtgctcccagccttctacattcatggtgcaagtgaagtagtggtcgtggtttatgacaggcgtagaaacgtgttgtgaattcgtgctctgagattggcggaatgtcgtccatcggtcttggttgatactcgtaatcggtattcgcatggtcagggaatgaatctttgattctgagcgcgaactcgtggtcatcgaacttgacaaactgcagattttatacttagaacccatcctgaagtacaaaataaaaacacttactttgtaaaagtcacaatgagagtacctccagacgctaaaccagcctcgtaagacacctcggaggcggaaatactccattttcatggtgctaaagaaggtatgacaggtcatattgctaacgcatatttgtgcaagtctataatctccacctttcttagcgagaaagaggacgcggtgcttagtggtgctcatatcggccttgagtcctgagggtggacaatgaagtgaagagttggagggtgcaccgctcggctgctggcctccatgatcttgacaggagatctgactggagattagactagtgttcagggcgctgcgagggttcgagtcaggtatagtatgtgcctctggaggaggctgcgtaatttgagtcgctaaggtattcacgggaaggctcctaattatggactggaggcgtttgacaagggtgtttggtacctccgcctatcgctcttcaccacatacctagataacgaattagggctggatctatgctgtgtaaagttgtctatagtttataaactcacacactcccaccgtaaccgtgtctctgattctgccagcggtctcagacagtgaggtaatggccaccaatcccaaggctctccagtccagcgctcaattaaatactgacagtggctcatgaacctgaaaaatcgagagctattttcgtcacgttcaaattgaatcccgcgggggctcacgtgctgcaattctgtagcaagattccgtagtttataccgagcagcatcggcatggttcttatgttctggatttgaccacctgctcaccagatcccgaaacctggagttcagcgagggttcaataaaatccacgagccgacgataaaggatttggtaggcggtactttccaaaataaaatgcttcatttgatccaaattttgcaaatttccctcatacgggtcatcctcaccagcttcctctgccacagagtcttggtcactttcctcatcatcaggatcaagtacctggattacttcacttgtttgaggagcaggtccgcttctgtgtagactttgaagataagactccacttttctctcgtctgctaggcgtttttcaacagatgttattccattttctgtcttgaaatcgtgaggtttgatgtttggctgatcgtcgataggtaccatagcaaagagctcgcgggtgatcatggccgaatatgagcttatgaatctccttaggtcttggtgcgattcgctgagaatctctgccttgaggttattcgcaaagtgtttcaataatctcctaaaattgtttcgcatcctctcaaatccgaccgagtcttttgatacgccgatcaaaagtaaggaaaagatgactccatcttcattcaacaagtttgcaaactcttggatcaacagcgaattcatctcttctcttgcggagtccaatgatctggtgctaggcatagacactggagcagaaaacactgagtcattctcaatggaggaatcggagtccaccgaacccacatgtctattgcgtacggcagcctctgaggagaagcctagagtatgaagatcctctagccctggcgtctgcctgcgagtctccaaaacctgcacctcaagccgctccgcctctacccaccggccctggttccggtacgtcgatgccagattggccatgcctgtcagcgtatcaggatggtccgcgccgagcttcatcttgcgagtctccaaaacctgcacctcgagccgctccgcctcttcacaccggccctggttccggtacgtcaatgccagattggccatgcctgtcagcgtatcaagatgatccgtgccaagcttcatcttgcgagtctccaaaacctgcacctcgagccgctccgcctcctcccaccgcccctcaagtcggtatgctattgccaacatggctaagctatcaagagcctcttcatgctctggacctagtaaaatcactctctgttctcttgattttgctgccatatcccttgtatttgcgacgctgccgctttgcgacgcataccatgcacctctataaagtagtgtggcccatttgaatagagagtctcgtgatttcggtcgttgggacatagctgaacgaacgtgaggaaagagcgaccggcatttcccccaattttcgtatggactaatagggaactcctggtacaaattgcttataaacctctccctccactggtctatttctccataggatttcaaccacgcgcgcgtagttaattgcactagcctgctcatcctgaatgaagtgctatttttgctgatagatataaatgaataatctctcagcattctgatatcatcttcaaattcagagtcagcatcatattcagatatcccgccatcgctagggtcgtcagggagctctggatcagagttatagctagccttaggttgatgccggataaggttctctggtatcccttgccgatcaaaaaagctcataagagaaagcaatcccgctgcagatggcttgctttggcgtatataatcgattgataattgccacgtgattagaatcgagtttttggcttcccaatctcgggaggagtgatctgcctcttgtatcaataacgctgttgctttgcggtcactgccctggaagtcttttaggtattttgataccgaacagcgaggtgcccgattttgtatatagctagcggcctgcacaatcgctaacggcatgagctccaacgcgttcactaactgttgaccttcttggctttcatctggctgatcgaggtttttttggagaagttctagcgcttcagactgttccataggtttaacctcgataaggtccttatggtcgactatcttcaacgccacctctttggtccgactcgtgataatcacagatccatttcggcttttaggaatatattcccatagtggttttgtcaaggtgtctgttcggctgtttttctgatcttcattctttgccactgaaaatgggcaaagaagttgattgtcatcgacattatcaaggattaatagccattttcctctcttgtcatccccgagccagttctcaaccagtccgaatatattaactttaggatcttgacaacctagaactttgacctggtttgcgatatccctgaaaccttgctcgaagcgggcttcgttgctcgcatgaacccaaaagacccatgttgctggcgactcgaaccgaacccggtagccgtattcgatggcaagttgcgatttccttgtcgttgtaagcaatgagtaataaatcacatactagtcgttttccactcacccgacacctccaaggccaaccagcgcgattctcgaccctggcaacgagcttttctcgtggatgcgatgaagtaggatgtcgcgactgacaaaattcggatcgcgagggaaagggatagttgatagagggctgggtggagtttccggtcgccctagattggatacagcgattagtcacagtcgcgagcttgtcccgctcccctgacttacctagaggccaatggaggaccgagtcgttgttatctccgatctggagtcctttgtttttgccacggaatgatatcgatgccatagtcgaataaacgtgccttgattacgggataaagttcatgagaaggcttttagtctgctactcagctgaaggagtggtaccttaggttcgtcatcaggtgactctcgcggcgctaagagacgggaattgattggcagcaacccacgtagaacattcagtcgatcctgactagggtgaaattagcaccttccaggaacttgctcggcccgggcccgaacacccagatcaagtgcagcactcatcccgtcgcgtttttccccgttttaacggcacgaataaaaaaatacgagatcacgaacgaacgcgtgattgttcaacctgcaatcatattcatgaggtccgtagcttcgagatggccccccgagctcccaggaatctgtggaattgtcaagtcacgtgcatttcctaaaacctagcacccccggactttttacccaaaatcatttcatctgctcactgagcagaggggtgagcaaggggaaaagatggagtcgccccccactctttcttagtggccgaccactgccctgccaacgctctaccctttctactagacgcccggaagaccatacaaggctaatacggaagccgtttttgctgtaatttacaattgtacttgaatactgccaagaaacggagtcaggggtaaagcgaccataataggtatagcttttttcgaaaaagggtttgagatagaatctgtgtataagtggtgagactgatttcgatccatcctgtatcggcatctcaatgcttgcttgcaagctaggggaatccctgccatagccagaaagtggatatcgagcttcatgagcaaccgccacgccagcataggatttgacgacttccgtaccgaattagcactgttggagaacgcgggattggcacaagggtcccccctctctcctatcctctttgcattcttcaacgccgacctagtagaccaatcggtcacccttcacggtggcgcctcggcattcatcgacgactattttcgctggagagtaggccgctcagcggaggagaatttggccaagatacagtccgaggacatcccccggaccgaagcatgggcgcggaggactgggtcctgcttcgcagcccagaagaccgagctcatccacctaaccagaaagaaaaccgaacacctgcatggtcaaatagtcgtaaacgggacggcagtcacaccctcccccacagccaagttactgggtgtcactttcgaccaggagttgcggtggaaggagcacgtgcaacaactgattaagcgtgcaaccaaagtcaccgtcgctttaggcgggctacgacacctgcgcccagaacagatgcgacagctctaccaggcatgcgttaccccagtcgtggattatgcatcaaccgtgtggcacgatccactaagagacaaaacccaccttcgacacctcaacacagtacagagaacctcactggtccgcatcctgtcggcattcagaatttgtgagatgtaggggccgatcgacgttcagcccatccgctgcctgatgagttgcacgtgagtacgaaggtattggtatttcctaataactagaagagggcaataccatagttcactattacgatacatttcaatatactgaaacgcactaaatcaaatatagattagcgcgctacagaatagggtctaagaaggaatctttgagcgctaattttcagaaacaaggtatacagtctgatataaaaacttgaaacaagtaaatcattaatgttttgatgaagtgcaactcaacaacggttttggcaaaatcgttttgcgatgaaggaacaatattacatgtaaatgtttctacaatttcaatgattgaaaaaagaaaccgccgtctgtgacacgagcgaatccatctccacgtcttcccaaactttggaggcctcttgagaagacaaactcgtctcatcctgctcatttactcgtatcagtgtagcttggccgagaaggccgcttttctcttcattcacagccttgaccaggtcatcaggcaattgcccaaacatcattgccttcgtgatatcctccaatgatctgaagaaagaaaggcatccggggcgagcagctttaatatacgttattaatgcgttcatttggctcatggtaaacttctcatttctgctgtaatatcaggtggtatttagtattgagaagggctagcactgtgtcatgatcactcacattaccatagcgagctgttcactgggtacaagtagtactccaagaccaatgccactcgcaagcgtccaccatcgtttgccccagcgatgaaactcattcaactttgctcttccagaatcaaggttttctttgctgaagctttgtattttaatcccatgtaaggctgccaggatcttatcgttggccattgttgtaaatcggtcgtctccagaccgaggttcgtagccaccgaggtcttcattagccctcatttcgcgggcgatttcaagatagatcaagtaaaaacaaacgagtgccatgcggtgttccaagccatacttaagaagtctcttcgactggagtagctcgaaatatttcgcggcagctggcgcactcttttctagaggcggaaatccgaggacgtgcttatcactggacaaatttttgcgccattcctttagttgaggttgtaatagtgcgtgataatctttcacaatcatgtaatccgcaactgtttgaacctcccgcgcttgtttggtgacgttcttctcttttttcttatcaaagcagttttggagcaaaacaaaaattgtttcatttatattgtcttctcgcgactctggctcttttcgtctttttatttttccttgcgaggttgattgttttcgggtccgcttttttggcgtaatagatggcgttgaacccttgtcgcagggtgtgctgcatttagaaataggtgtcgcgtaggtgccgataggtgattgagcagttagtaggatagtggcatttccggttgagctttccacgtgcccttcgttataaagttcctcatggctactggtctccggtgtgaaaccctgaggggggcttcgagcgttctctagtagattcaacgatggttgaaaagccatgtgcatctcttttcggccacccccttgcatatctggagctgaagagtcttccgttcctaggcttgaaattgcatttccgagtgtgtcgaaactcgtatctagtgttatattatggttattctgaactccggtgttcatcgaattggcttgaactgaaatcggcggcttcagaacctgaggcggagggaattcgcagttaataagcttgacattcatgaaattcgagttggcaatgtcagatttgtcgatatcagagtcaacgatgatacatttcgaaacaacagcgccatcaatatcggctttatcaagcactgttgtggtgggtatctggtttttatcggcatacgcggcgataatagtgtctgtaattcgcgaatgtctcatcgtaacgttgatgcaaatcacttgattcatgattgtgtttttgatcttgctgttggtaatgaaagcaaaattgatgacattcccagtagcggggacggtgtcaaagctttgcaaaatgttccaatcagatgtgaaatcaagacaatcgtcaaattgtggatcaaaaagctgattcaatacaggacttggcgcttgtgcttgttgatttcccgagtcaattgtatcgtatataagaccggtagattcggtttgttcggactgagctgagggatccatcatcttttctttcattgtcagctcacactaatatgtcataattgcttttagaagaaaaagaaaagcagtttaccttagattttacttctcaatgctcaaagtttcaggtgggtttcaatgtccaattccaagcattggcaattctggtgtagcggaggcaggtctccgtaaacaataaaagtagaagccgcgttggtatgaaatgaaggaaccaaaaataactgaataaatcctcgtagaaataatagagagtggacggtgagaacgcatctaaagggagggatgcgaggcaaagagcgaagaatggaaaacaaggagatataaacatcatgggaaatgatcagtcacgttccctgagcagaatcgttcagaaactctgagattagaaggacaaaatgcattgctcaaaacacatgacatcataaaactgagcagagctgagcactaaagtgtggccgcgacaccaattcgtagtcgcagaaagctatcgtggcctaaataacggtgccgctttccgaagagtgtcgcagccccgctcaataactcgtgctccaaaacggtgtcgcaggccccaaaattcgaaacacccggatgacttgactattgtaaattcatatcacctaagaatacagtattctcgcataaccagatctgccacggataatttaatccaatacatgctaagaatacaactcccaggccatctgctccgcaatcaacaaaccagagcctctcggagctatggctgatactcgagctcgatcatttgtaggcgttggtgtaaatatcctcgagcaatatgtcgcagattatctcgcaagcgtgccgaggcggaagctacaaacatatccatgtcagcttttggcaatatatcctgtttttagaaccctactgattaatagcatttggcctctctcatctcgaatattggggagtctctcgattttttcaccggaaacctctgcgggaatgatgattgagtagtccggtgtgccctgatatagaaacgctcggtcgtgcttgccaaaaggcaatttctcatgcgagagaagccctcgcccaacgtagacagatatggcaagtatctaaggctccatcagcttgctggtcatagaaaaatcacattgaacgaacgtagccatcatccagcacatcgtcttttaacaaatcgttcaggaggccttgcatggaaatagcaacatctatatagttagcctgtcccctcctgttcgtcggcagcaagaaaaccaaccaagcgattctacctgccatatcaagtgcatcctgcggacatgcgatgtgcacgtattatacccatggatcaatttcttcgcataaggaatgatggcggcaattcctgccccacttgccaccaacagcacactctcatatttgtccacacactcgctgattccgtggggaccactataaagggccaacgaagaaaagtttccctttggtgctgcgtgcgcctgacggacaagagttttggtgagccctccacgaggctctaccaagagatccaacacaccttgatctgtccgagaccaagacgtgatcataaatggatgcgtctgcacccatgaccataagcctagtgaaggcagccacaggttgatgtattgtccggccattgctttgatcggcctcggtaggatgaggcggactcgaatgggcgttgccctcgcgtgttggcctgcattttctgcgtcgcgctcattcttatggcagatcgcaatagctctcgggcatccgttgcccgaaaatagaccgttcctataaagaaagagtatcaagtgggagaaggatgtactgcccaaaatccccaatgcaatatagagatacaaccgggaggaatacttttcactgggaagatgccgccaaatcccataaacacttacgactgcgagtgcctgatgaagtcgaagaaacaactcgtatgaaagtctccgacagaaaggcaaggataatatgacaagggagcacagacatccagcgccctaaatttcataaagctgttagatcagatccagatagtgactgattcactttacaaacaattattgcagagagacgcccagtatttatctcctgatcctcatgggttttgccctgtagcatggccaaaacgtgaaacactaccaaagctaccaccatccagcctgcagcgcgatgcatccgtcggtaaattctcagagaaatcccgagaatatcagccaagttgctcaaatgccatgaagccagaaggaatatcatattgagtagcgacagagttcccgctcggcgacctgaggctgccatagatatactgttgaagaacaggagcagcaggttgattgcgaggtagatcaaatgaagaaaaacaccggctcgtgtccaaggccccagaagtgaatggcgaccaagaacatacggatatgcaagatgttggtaaatgaagacattcatcgcgttactccagggcgcaaagactttcaaggctctatagataacaagacttaggaagatgccaccaatggcgatcgcataaatagtcaagatatccatgttgcgaactgaaagcaaagtgaagcccggtctgttatgtccttcttatagaggaagtatcagttacaagtcgaccttaaaataggtcgctgagagtaagtatactcgacaaaccctaggagttaggtacttggtcgctgtggatggttcgagcagcataatgaatgctacttccttgcggaataccgaggacccccactgagaccttgagcaaagacttattaaccacgaagcggacaaggttacagtaattcgaaatattatcatatatccaatggctccaagttccgaacttatctctacaatcactgccaaacaagacagccctcgcgcgagagcacagaaagtacgcaggcgcagaaaaggtcttttcaaaaaggcagctgagtacagtattaactgtgagtcggacgtcgttgtagccgtccgaaatcggcaaagtggtcaactatatatcttcgagtcaagtaagaagaagtggcttccggcagaaatggacatggtatgaattttttgtcgtgctggaagccatcttgcttatcaacttacaggacaattattatccacggccaattacggagaccacggaagacattattccttgcttggagaggttggaagaggaagaattgcgggcggatatagaatgaattaatatatctatgttattgtcacagtatcgttgtggggagatatctcgtacttgtatagaaggctagaaaatagaaagcgactatagggctgtgctgtcctgttccatcacgttgagggagattttatcaattaacagcatcaaataattcggtacggtcatgtgtagactccagtctttgatgaaagagctcacgtgatcgtatcgaatattcgacacggtcacgtggtaccagaaccttctccggaagttccactatcccctgcccccctcagtgcgaaggaacaaagattttccatccgcgctcggagtgcattgagcgctctgtctacgtaagccttcgtaaggcccatagctcaccttcattggtccattctcagttcacatgatcttcctgcaccgggcattgattaattcagacctgttgaaatgggcctacttttttaaccaccccgttcaacttccactccgtttctcacctgttgcctttaagatgatcaaaaaattcgtgcttatacgctttttcaggagtgatttagtgtttagaaatgccgcgtataccttgtataccttgtatacattcaatcctcttttcaggctatgtttatcgagttgtcgaagtatgatgcgaattcaacacccctcatgatcagagagggtgagcgagtccgaaatgaacaccgggcagagggcgaatcccccccattcaggtcttcttcgcccgcccatctctctacgatactctactccacgaaaccttccagtggcccggccaaatcacagctttcgtcactggactttctatttcgctacccaaagcttttgtgtcggaaatgctccaacttaaattaactctaaatgtgagttgttttcttgcttgaatctctcatcatctgacgttgcctacagaacactcatgatacagagcagaacattctcaatgacttactaccccctccgtcagccgataaggtttgtcatttccacctccgaccggtcgcaaggtatctaattcaattgtagattgcacgcttactctgccactgttgcaatattctatcttccctttctcgcgataagatcgccctcctctacgagcgagcccgaacgagcacagattgtcttgtcgactttgatataaaggaatactgccaagtgaagtcgcctgcagcaggtacctcgacctttggtagtgtcgcacatactagatcgcttgagccagcctacatcggtaatattttatgtttctaacgcacgaaaattaccgttacttactttgctcaacttttagatccttccttactcacgacgagtatgaacgtacgagaccgcaagatagcgccctgtgtttcaacacctgatcctagccattttccaaccctggcactttcgaacgcgggagtcatgttgagtcaagcagcctcacccccacgcggtaatattcaaaaccctacagagatcgggctattggcgtttaaacaaaggctaacttaggaatatagaaacagtccccaatctccataccaatccgtctcccgtcatcccacacgatggttgtctctccaataagttcgactgggcactccgagaatataacaatctaaacgcaccagacccttcactcaatttcgctcctagatcctgcgatccaacaaaagaaggtgattcatccatagtacatttgacaggagggtccgaaggtcaataggctcccggcatagctttcgataaagatggtcccatagctagcatcccaacgtctcaatctcctgtatacggccgccctgtagggataggtaagaggtcaccagaaattccaccgcatcatgcttccgctggtattatggaagaagggggtttgaatgagatggaagtatcggatgctgaagaagaagcacaacaagatatcacgggcaaaaatccaattgaaaatcgcccagccgatggattatcctctccatctctatatccagttgcaggtatctcttatcccacacctagttcaaatccgccggatacgtcagtcccaacgactaggcgtgtagagcgatcggcagaagtgacaacaagcgacgttaactcagaagatcgaactgtcgacaaatatcagagtgcacgcaccctctcgaaattacagccaacagtcgaagatacccctgataataccgaaattgataattcagagactttatctgtcaatgacgaagacttattgatggatgaagactttagagagtcggacattaagtccgccttggacgatgtggtcaagtttttgcaggacacttcttacaatagtgggaccccttcaactagtgccaatacttccgtaaataccaagtcaaatccaaaaagattaactccagtgtctatctctcctacctccaatagaagcgaccagcataagcttatcaatgggaaacaacagaccaataatattcaagagactttagagtataaacgccgccagatcttacagcagaaacggaagcttcctgccagacttgaaccacactcaactctctacaccaggaacctcaggccccgtcttaacaggggaaaaagtgggaatcaagccccacatgacgacaaacttacagaggatgttggcaaaaattcatcctcggaaggagtcctagcaggttcagtggccaaaagtcgcgcagattcttcaagtattactcatctcaagacatcggtaccctccaattcagataaagacaaatagagtggtcccttattataccattctctcctgtccactctatcatcagaaaaaaaaagccgagattaaaaggaaatgcaatcgtatcttacgacctgatttgcctaagttcatagaaaagcacaccaaatcatagaaggctaccggattttaggattctccacagcttagcgtggagaatcattccctcgtatcctccaacacgaaaggctttacaatttagagatacgtagatactatacagacaggcgaagagacacattacctcaaatctcgacttacagatatcatactttatttagcgtatatcaaagaacttcgcagacaaaaagataccggtcatcccccccagactgcgaaggtcaaagccacagacatcatctatagcacagcgtccctttctaaaccattagcagagaaaactcagaagacttttcacgagcacaagctagttggtgagcgctagtagtggtccggttaccatctcggacatggattttttctcttatatagtcaagaaacgggaaagaaaatgtacagtttctccaagttctctggcttcgcgtcttccgctaattattctacagacaaagcaaaattttttccttagacgcttttattttatatattctttagaactgccagaatattctcgcttattacagaaagttcgaacaatcagtagataagctgttatccggcggcaaattcaccgagcagctttctaagaaagaagtacaattatagatccgcgaggccaaggccgtcagctggaacaacacacataccgcttactggaagccctagagcacaaataccgtggcaagcaaggcgtcggaatttctcttagcccagtcaagctgaacattttcgccgactttgaagctctcactgttcctattagttctcgaatgtatacattcgtttactattacactaacatctacacatctttaagccttaccctgcactcgttacagacgtagttcaattattagcaacatacgagataggctgtgcgcagctacagtgactgcttcgttcggaggttggcaacatttcagcgccgtatcggtttccaattcagcccctacaagcatccacggatatttagataaaccaagtatcgcctagtcactgcttaaattagatacacctttatacggaaacctttattttatattaacttggcgtaggcaggtgtgatacaatcggtaatatcgtgatatttttttaaataaacaatggcaagcgtgacgtttatcctataacactcagcccaggtctagcttggtcgttagacagatactaggctatataccataaggtggatcccgggatttactcacttatttccagtatacagggattctattgtcctttcttttacttcctcgcgctacatcttatatctagagtgaactataagttacatattcttaatattaattattcatcttgaaacactatccacctctaacgtgattccttaccgagcggccatccctgccgagcggccaccccactccaaatttcctatctcctaagcaacctatgttttcaatcatccactatacccctaaaacacactaaaaaagcccaaaaattcatcgaacaggagggcaggatcttattagctatcaaagctattcaaaatagccaaattccttcagtcgcagctactacacgctctttcaacgtccctcgttctaccctgcgggcccgtctaaccggccgaacaaatcggtctgatattcgaccaaacggccataaatttactcaaaataaggaggactcgattcaggattagttaatctctatagattcgagaggtacagctcttacaatcgaaatattacgagatatggccaatttattacttcagcgccggggtgataataccccccagactattagtaaaaactagccaacccaatatcttaaacgacatcccgggcttacaagccgattctctcgcaaatatgactatcggagggccttaatagaagatccaaaggttattatggagtggttcgatctctttcaaaaaactattatcaagtatagggatatttacaactttaataaatcaggctttacaatagggattagtacaacgactaaagtgattacccaatcattttataccggtcggagaggggttttacaagctaggaatcgtgaataggtaactataatcgaggctattagtacatctggatatacgctaccaccatacattattttcaaggggaagaactttatggaaagatggttcgacgacctccctcaccaataggctataaaccatagccctaatagatagacgagtgataagattggtattaattagctacaaaaacactttataccgcatactacaagccgtacgaagggaaaatatcgtcttttggttctcgatagtcacaacagtcacctaacagctcaatttaataagatttgcgaggaaaactatatcataccaatctatatacctgctcatacatctcatcttttacagccccttgatataggctgttttgcggttttaaagaggtcttatagaagccgggttacaggatatacccgattaggcatcaattctatcgaaaaagataactttatcgatatattccctatagctcgtacggatactttcaaagacactattatttatagtgcttttacagctaccggtctagtcccatttaaacctaatcgagtgctatctaagctcaatattcgtcttcaatccccgcccctactagatcggcctagttcgcaaggctcaacatcagatagcaatatctcgactagtatacctcagaacactaagcaactagcaaaacgcaaagctaggatcgatactgtactaggtaataagtcaaataagctatctagccctactaagcgtgatcttgagcagtatcataatataaccctcaagatcatacataagcttattttccaggataaggaaattaagcgattacgggctgcaaatgcaaaacaggtgaaaaagagggctaaatcgacaaagcagatatcctaccagggtagtctaacaaatcgtacgatcgctgatatagatagtaatagtgatattaagagatatatatctaatacaccatctatcccaaccctcccggcagagcccgaactacctattttacctactatacgtcgtcaaatcatatgctctaggtgcagtcagaaagggcatcaaattactagatgccctagagcttagtttagtgaatttaatggcgttttagttgattaattaatgtatgaaaattcggaatactactagggtagccgctcggcagggatagccgctcggcaaggaatcacgttacgtatacgtaagaccctctcattacgtaaccgaataaacttatcggagcatatctatctctctgaaacaatataagatactccttactaaaacctacagtccatttaagatctaagctttaaatttcttataaaaagtagcaatgagatgacactacctctcttcactcaattgtattttggagtagttatatttcaagccattcatactgcagcagttctacggccgactttcgataggtcgggtcaattataagcatacctcgaaggaagtcgatgaagacgggaatttcagcgtcagacatacagtggggtttaataagtctgttcccacccgcattttcacccatgaacattgaaatatatatctttatatatctatgcatagcaccaccatactttactcaatttacttcgaattaaatagggttgaaccctatgccaatctcgggtaaaatttaaatttaatattttgtataatacccctttgccttctgtactgccatatatctgcgccctatacttaaaatcaatgaatcaatcttcgactgcggaatagcatcctatactatctttatataccttttgaatactatctaatcctcctcagaccttcctatatatattagcttaggaaataactcaaaaagtttaacctttagccaccgctatataggttcaatcgggtttaaatctagtgagtgcggcagctactcctctatatatatcccgtgagttttaaaccattcctgtgtgattttagtagtatggatccgagtgttatcttactaaaagatagagtagggtcgatagaatggaagtagaccttcttcgagagtatctatataggaaatagtagtatatcctgtcttcttcgattccgggttaataatattctcccgccttataataatcaactctaatcgacttcttaaccagattgtaccctaaaccatttgtgaaatatctttaatgtataccttagcatttataagatcttttctatagccctccgaccgaaagcgccaacaccattgtggtctgcagtttgttattcgttgtacagaatactcatccgagaagacctagttttaaacgttatttctagaccactcagagcgctatttttgaataaaacgatatcgttgtcgagctaattcctttccgattggaatcttcctttttgtcctatattttagaagaccggttggccttaaaacgttaataatagtagagtgggatagatgactaggtatagtataactcagcgttttataggaccaaaaggggtgctagcgggcgagtataaaaagtaaatggtgagttcgatcactaaagatccttgggcgaccggttcgagggagagatttaatagtattgtgttctttgaaccgtttcaaagtattgtaaatcgttcggcgggagcacctaaaatcgagtgctagctttgactgggtggcaccggcctggtgggcataaataatagctgagcgctgagtaacagatagcttacctgattttgtacgacctaaaccaaggatatccttggttaatgccattggggggtgtgtaggaagaagaaaaaaaaccacgatggttgttagggggatagcaagtggggcagtgggaacagactttttgaacactatgtatcattgggtttaaggaaaggcctttcagcgccatctattagcctttcaagactagtagatatcagatctaagattcgaagaagaccgcctaagcagaattagtaaaattaggaaaatatgatattagcacttcttatttaaaagaaaggcataccatctgtattaaaaaattccgcagttctgtttcctttccgaagaagctcaggcaggaaattaccaagtatttcgattatccttgcgagccggttatcatcaaccgtccacaaaccgttttttaataccactccagaaaaaggcactatcccctagacaaattcaataatctattaaaaattaggagataaaaggcaacctcgccacagtttaagcgaatagattaaatacctataaggcaaccgaggctccagatatcaaccttagtatcctaataggcaccgatcgtgacttctagtactcgtaaagctagagattagattatatctaacagatgattttctgaccaagaagctacagccaaggtaagtgtcgcccagaaagataacaagacaagtgatacatactaacaccgaagtcaactattctaatatacagctcacacatctctgagataagcggcgtcctaataacctctcggagtagctttataataccacacttattactaacctatacaggaacttcagatagatatttatcaatggttttttccggattttccagctcaagcagtatattcgtcggttttagatctatatatcgactataattaataccattattgtgagtaggaggctattcgtaacatatggtattaccggtataaatgattccacactcctcatagaggaaatccaaccctagtagaagctatcgcgctatagttcttactaccttagtaggcaatctcccattttcgtattttacagtttaaaaatccaagtagtggcccaacacgtcaaacacaaagcatatatattgtccatttggccctttgtgtttgaattaatctagaaggggtaacacgtaatatcggccttcatggttactttttctagagatattagataatttcgagagaatttctcgctcaaagatatcatacgagccaccgtagcaatcggctcttagtattttaagagccacatacctttaaacccttcaatactcgataagctacatatttaataaatgtggagaactacactcacttagaatccctagctaaccaaacggtagaatattgtccgtagcctagtttcctcatcactttatatataccggagttgaaagtatctccaagcgaaacgggatagaagcctccagtagaataaaagtctacctcttctattatctagtataggtagggagctcttgacgtttaagaaacaggttcaaagaattttacaagccaagctcgagaatttacccgagtcaaagctcttttaaaagtagtaatcatcttaggatttttttggcaggattagtggcatgaatcttttgcaccggtcatcgaacaaattataaataattccgggggattcccgaacgcttataagttactagacgagatagtcacgtgctcttatagcagcatagctcactcctgtgctaagagcatcacatatatctaaaataattagcgtgtgaaactaagctactgagtgtctatacacgaagaacctctgggactttaaaatgataaaggccgatcttaccataaggcggtcgctctagcttctctgctcgcggctcggcaataactcatctccacggtcgcatcgatatgactcaatgtaggtccttgtttactcgactcgagcatggctccgtccacgaagcatctctttttaattatccagcgaattacacgcaaacctttttagaagattattgatctactctctacattacttaagccgcggggaggattaaatcaatagaacttcattatcatcactagtcgctctcacaggctcagtggactacttatagtaggcaggccatgcccatttttggctaaacgtcatatatttttcaacaacctgcagatataaatataaaaagtttgcaattacacaagcaccccaccccgggtaggttttatatctcagacctcctgacaacgttcaaccaacaaagcctagtaccgacccacaaggaaagcgcagcgcatatcacagcttcaggtgcgatttaagtaacatcacgtgttttaaaccgcacagcgaagtcaacgtatatcaatagatatatctctttatcacaaattcaccatcctctttaatcatctcaacagtccagtactctcctttagggtctaggtttctgggatcattatatttcgctcccctgtattggtaagcaagccgcctttgacacatataaaagcacttacttaacaaccgcttcagagactcctcgcttctccatactatctttgttggcatcatagaactttttgatagccgtctcggcttcactacgcttctcagggctattcttatagatatcttccctaaaccatcttatggccctaaggggatatcctagaataggagttcgaaacataataaatgtaaagataaagaacagaactttagcaataactatccagtttagaaagaaaattgtctttagcttaaaggagggcgaaagatactgctatttaacatttctagtatttcgaactccttaaaattgcgcataaagggcctccaatcgataaacgcttagaccttggcgtgaaattgctaaccaagtacactaaagttcaaactacgaggcaatacgcgcgcggcaggtcagaaatacagtctcggccaatagagactaatatcacctgaacgaaggagcgccaaccccgtagccgtagtgacatacataaggccagactaaacgccactaggtatacccatattctagaccctacatatcaggtagttagcaaatggcataggatatagctacatacggtattacgctattattattttaatcgcgcgtactaaaaccaaaatacatacaaaatagcgttagcggcaaggcgcacgcaaccttccgaaataagcaactaaaagagatcaataataaaggctgaatggggccgatgtcagaccgccctaatacacctgtatatcaatcttgatcaggggtcgtgctgagcagatcagctgtaaagtcctcgaacacgaccaattataccacgtcccttcggatggccatccagaaggctacgtttcgattggtcttcctggcactaaactatatttactctacctagggattcaatcataggaaaaagtaactggtagctaaatatatacctacggggtatatctaaatctctcggccgtctaaaataagttaattttgaaaatacttaggatacaagctagccgttacagtactgtagagtacgtaaaatatatatgcacggataggggaaataaggactacgagaattgcgactcatcctacattctctccagacacaccaatgattcatctttttttacacaacaaagtacaaaatccacgagatcactttccattttgtatgtgtctctatacaatgaacttccggaacggaggactaacatacctcaagattattcgttattactaccttatttttccgacttaggctcccgtcatatgacgttaggccgtaacagccccgcctattcctacatcggacgaaatgtcgacaagacccctcgcttcccaaagcacatctctctatagttggtaagtatcaaaccaggtcgggtaaaaccatcaagctgactttactacagtcaacttctaggctttacgaagaaatagcgggtaagcccctgtgggaaagcgcgaaaacgatattgtcgaatataaggggtcttatccagagcggaagcatggaacgggtcaaagagagtaaattaggctggcaataccaccttttagaggaatacatcgcaataaaagcagatatagaagctcggggtcataaagtatatatcatcttaccacagccattttataatattaatcttacagtccttatctaggtactcgattgcacagtctttcacttcgcattagccgctaggcttaagaaccccacaaaacggctgtggctcgcgcccatacaagggaaatcaaacttaacccgtacagaaaccttactgccgggctcatactgggacattacagacatcgatcgagttctcacgccagaccgcttcaccggctcagacatcctaatagtaacacttgacaggagtggaaaaaattagatacatgaatggttagttgtcaggacacaactagttagtagaaagcaaattgcaatgtatacaacaacgatatatattatgatcataccgagctcttcaatttcaaaacacagaaagcatagggcgttcgtgatatagaaggttattgtcgtaattgcggaggccctcagattagcgttcgctctgggtagtcgataaaatagttctatagccgggattgaagactagagagcggccaggatcaaactgggcgcagagttccatatccaccgtctcatcctagctaaccgaagggatcgtcccgtagtcaaattggttgaatactggagggatgctgccagggtcaaactaggcgccgagatccatatccgccgtttcatcctagctaaccgagggaatcgtcccgtagtcaaattggttgaatactggatagatatggccagggtcaaactgggcgccgagatccatatccatcgtctcatcctagctaaccgaggggatcgtcccgtagtcaaattggttgaatactagagggatactaccagggtcaaactgggcgctaagattcatattcaaggtttcatcttggctgattggccggatcgtttcatagtcacattgattgaaatttggtaaaacttgatccatgtcatatcgggtgcggagttccaagactctactttcatgctcaaaaactggttgtatctgtcttatcaggtatacagccgcttccgtactatgactcctagcagagctcatatctgtttcggtattccttaagtgagtcagaggtcgaggctccgaatcctgattgatcaattcagagatagccagcggaacgcttctttcccgtggcgcttgaatggttaatattgtattgtactcaatcagaggaggctgtcgtctatcatatgaatatgagtccggctagtaaagattgaagcgattgtttgatattgtaggtccagaggtaagtagataactgcgtgtttgctcataattttgtggttcacccaatgtcataagttgacttggaattgtatagagcaaacttccgctaatttcacacccccaagttctttaaatctttcgccacatagtgtgccttgctaccgtcgaaattagaggtactcttataaatgtacgacaaacttaccatcatatcggatttgacaggcagtcaaccataaagatttgtcctttgccaaatcatgccaggcaccagatttccgaagcagatgtttcagagccacgaaacttccatacttgacctcgcgaaacaaggtgaacaataatatcaaaatggctgacactccaacgtgaccatatatccgttcgaaaacgagcaaacgaatgccgtctctaataccatgagatgccgattccttgtttttgaatgaaatagcgtttgatgccaggaacctgttgatgagcccactgttatcgtcaattacctgcggagctagtgaacgccctgacacttgtgacgttccgaaggcttcacgttcccattcatcgaactctattgcgagggacctttgtccaagtccgcgtcggaaacacgcatccagtgagcagccccggttgcaaagtcggatatcgaccacacgagggtcctcttgtacccaatcgtcaccgttctgcgcaagtggatcgggacgagaagataaatatttgaaaaccttttcagatcgacgggcaccctgaagcgcatccataagcctttgagcatccaaggcttctgatgcttcctcggtcgtgtcattgttttcaccagtctcttccacaaacgattgggtagcgcaggatgtcccactgctaggaggtgtttccgagcaagtaatggaagttgttggtgtaggctgctgggaagaatgttggagactggtttccgaccgtggagcctcgctcggaatagtgtctagtgttctctctataattcgcaaggtttgttccaacttggttcggtatggtataaggtcttgagtgctaattgcacccagtctcgacaaattttgaatcgcctcagcaatcgcagatatgtttatcattatggggaagaagttgaaaaatggagaaagtcacggtcgagaagaacgatcaaggccgaaatagcgggcattgttcaccgctcacgaactctcagatgcagcgagtatgtgcgtatgggatccctgctagtgcgccccaaatcatatttcgggcgcactagcaaggacatctcctgcctgtggcgcatttacccctcagctcatcggctgagtcttctcaagaggctgcctgactgcaacctgttggacactatgaactttaaatcttggcccgttgactgcagctaagctgttgttcactaagagataagtttttcttttcttcttttctttttttacactagtagaggatgtcgttggacaggatggggttatcagttctcccccgcttagcgacttgaatgcgattttggtatagtaacatctgaacaagagatgccgactcttctctgtgtatcctgacataaagagccttctgattttctgggctgtcaatcattcgaaatctcatttgagaatccacggcagcgagctatgatttgcttcagcctacagagagtttattgtgcggtttcaaactgcatttcccgcctcttctccttcccaaacagctcgcgcgagacaattctatttgggggcccagaccccaatcgaagtagtatgcatgcacttgcgaaaggcgccatgcctacgatgttggaagaacagccggccttttctcccccttcagactctagtctttctgccaaaaactcagtaccgattcgtttacatgtaagtcaccctttctcgacattaacacaaactctaaccaaataagaccgtacgaatttggttttatcccaaaggttttggacttatggaagacatcaaaagaaagggcctcgaggatgtggtttttgacgccattgttcttccagatgtcagcactcagcatccctcccaggatcctggaatcacaacatccgcagtcttagtggatcttgcagtatttgagatcggcatctctcgggttttagggaaatatgggattctaagattcgatcctctgagcagcgatgatccgattgtcttgcaacaaccagtggaagacctcgactcaaagaaagctctttgctatcagcaccttcatttcaaataccgacaagagtatgaaaaaaggcagcaacttgcagaaatcttgggatatcagatgcaacagattttgacggattggtatgaagcctgtcttcaagacattggcaaacggtttgaaaggctaggataccgttgataaagtagatacattctcattcatcctaataactgattttaccaccaaatgagctcaatacagaaagagtaaaaagtcgaaactcggaggggccgtgtcacacataattcttcgatagtgaacctcaagtatttccctcactgcaatgtcgtgtggttttcgtaggaaagtaatcaaaccctgcgatgcttgagaagatgaagcatcaaaatgccaggtgattacggctagcattaggacagtgccataactgaggtcgtgaaaaacatccccctggagagagagtttctcatcaaggtactgttgtcgaaccctgctgttccgcaaatccttgcagacatctaataataacctagcatcgtggctggtgtcttctggtggtgtccatctcgaaagtaacggagaatccattctcaaaaagagcagagcctctagagcaattcttgccggcttgtataggatctgaagcggaaagggaccaggctttgatataagaatttcgtgatcaccggctaaaggtatgggtactcaccatgatttaattttttttcccttaacggcgaggtgcagtcgatggctcccttcaacaatagaaacaagtctttttatcaccgaaattgaagcacacgcccgaagcattttgtctttattaatgttattatcaagttatctacagtgtttgaaactgtatccaaaataggcctcatgtcttgcctttcttctctctcgttacgtttcattactcctgactggatagggtacctttgggggccggaagaagaccggaaaacaggcgaagatcgagaacctgcagctttcaatcctgtcagtccgtacaagtggaatgaacacgcggtctaccggttggaaaatgataaacctccattcagccctaagaagcctctaccagtatgcctcccaaagagaacagagacgatcagggcatcgcgcatcagatcatttgaagattatgcaagtgagtttttccacaaagggcaggactcctgattgtgccttctcactctttatcacttagagcacagttctccaaatgcctctcttcaatcggacggcaacacagacagagaaattattgagctccacctccctccaagcactcgacttgtcagaggcagagttatcggcgaagtaccccatggattaactctttggaattacaatcagacattcgttgaacatggtgccaaaccttgatcagaacaccgagcctctagtaaggttacttcctcattacttaattctcaagtttgttgactttttatagcttttaggtatctacatattggcggtgctgaaggtatttcgggaggctcgtagttagaaacatggagaatttggaggattgcagacaccgaaagcgaagacaggccttgatatcgagcagagatatctagaagaggaaacaattgggagcaccaaatacaaatagcaatatacacgacgaaattgcaaacccgccaatcttgcatataatgttatactagccacttttcggatttgcaattttgtcgaaaccattactaccatgtaatatgaaggagtaaatattgacgtatagtgaacattttgaattgattcgctagagctctgcagtaaatgacacaccgcgtctgaggtgtgatcatgacctttgctaactatagattacttcaatggaagtgaaaaatagcctggagagatcggctatttgcaaagcaaaggtgggtttcatatatcttcttctttcacaacaggcgttctccaattctcctggttgccttatagccagatttctatgaaaaggcatcaccacgagcgaagcatccatattcttgcaataaaccttcattattttcatataccaagatgaaccattcgcagtcatccactggctcgctcttcgcactccaaaacatgatcaaagttcggtacagcgttatacaaatgatactgatacttaactatctcttcatcgcatcatcaaccgtcgagaatgaatccaagcttcggagagttataattatggaggagaaggaatgggaggcccgcttcgtgcctgggcgctccaacgacatgcaggtagaaaagtggtggatagagacacgaaactttctcacagaagcaggatccctccgtgcgttttcagtggaagatttaaaaggccacctcgggtatatgctcttcatgcttggcgaaatttccctacggccgccctctcccaggttcatgccaaggacgcggcaaaccccttctagaagaccctttgggagtagagcaagtatagctctcatttgctacagcatttcgggagtagccaatatcagtgactatcaatcagttgatccatggttatttgacatgggattcgttcatgatatgctccgccgtcttcaaagatcgcccttattcgataacgacattcggttagacgaactcaaaattgtgctcacaaatctagaagcgattttgtctatggaagatgagcggtccgctttgattcaacctcatccaatcgacatcaaaaatactgttcaaacacaagcttattttgcgacagcatttcgtgcacttgaaccaagcatactattgcaaattttgccgaaatggagaaaactttggatcgaatccagagagaacaacaaagacaaattgcagtgcctgctcaaggaaccaatgactcatggtaggaagcaggacgctattcattttgctgatgccgctttctgacattgacagatatgagagtacaacatattgcacacatctttcaagaagtctcatctatgaatgcactagtgcaagagacaaaggaggtgaagctgttaagaagatccaagcccgatagaatgatacttgttgagatttttcaaatcagaggcatccagcaaagatgcgagaatatgcacctaggttagccgacctgtaccgacgtggcatggcatggactaacatggtgcagcagaaccagtggtagtccacattgcccaggtctcgccaaatccgtgaggtgctcgagccgaacgcccttcaccaagaacaagagaaactacaggaactgggcgagatgagggatctaatcgggacagatgccctaggctgggtttcagatgaggatgagcttgaacggtgtaggggtatcatccagagcaccaaagacggtttgatggaacattcaagcactgagatggataaaattgcggtcctttcccatttccctttcgatgaccacgaacaaaatgcgtgataacttcagatctcgatcttggtagataatatttattcatatatagcttacggacatctgaagatagcttgtcccgaatttgagcaacagatgatcttccacggcgattcgctcgtagttctcgagaccttgttctctactaatcgggaccccaatacctttgatggctacctctttgtggatcccacgactggggcctgcaatataagcagcacggtcacacccaccgaaaagtggctgccatttgccatcggagcctcgacatgccctggacgtcttgctgaaacaagaattacccaggtgtaattctcgagatcttgttctttgctaatcaggacctcaacccctttgatggctaccgctttgtggatcccacgacgggtgcctgcgatataagcagcacggtaacagccaccgaaaagtggctgtcatttgccatcggagcctcgacatgccctgggcgtcttgctggaacaagaattacccaggtcatgttcgccaagatcctatatggctaagatgcagatttggagggtgtcgatgcgcaattatttccaaacggggcggccgaatccggccgcgccggcacaaaatgctttttgtagctaggttgacttcacacacgtacgagatggccctgagctacatcagtatacatcgatatcattgactagttatccttcgctaaagatagacgttgttttctaagtgtagtgctccagtatacctgtattgaccctgagctcctcccagggaatttttgacaaaatcgcttggtcacttccggccaagcaagattttgtttttcccgaagtttcactaataggcgaccctcttccacggaccatggtagaccttttctcgatgcacacgtatgctctgcattgactgtatcgccgcttgtgcttgagttgctggacgtaggtgtcatgtcttcatcgtggtccgagatacatgttgatacaggcgtgtcatttgtggtcgaaggcgagggaaggcagcgaggtaaggcaccctcaaataaccaagacaggaactgtagtcggttattaaccgagagggcggagaattgagcacgaacggtggggaatgaaacgtcgttcttgcagccgagtccgcaagcaaatcggcgggtacgattcttaccgcggctttccacgacacctgcaactttgttgattttggaaagctgccgaataggtttcaccttgcccttggagctatgtcgtctgccacgggagcagacatctttgtccaaaaatcgagaattgccagctggtgattcgcttgaacggattgcgacgcgaggcgtaggctctgccgcttgagtctgcctaacatccgggaaatgatacccgtccaggattgccgggtcgattgttgcatcgtctgaaagatattcagtctgagtagggtttacaggagcctcaacccgagattgctgaccagcagtgaaagcgagcttcgggtcgcctgattcgaagctaggcagttggtgctcagagtcctgaccaatatcaccgaaaattgaactatgatcaacgtttccatggccagatagatcttgcgcatgtaaaatactctcagggtcgaacgtctcaatgtcttcattgaagggtggcggtggctccaaaacctccggctcgactcgaacgatttgtgtgtgtggttgcaaatcgccatgcaaacaaacctccatcggcggacgaacaggaagaggatgcagcttaggtttgggtaaagagactttctggctctctgaaaggggatccctggggtttgagggagacggtgcggcagcgatcgagacgggacttgggtagcgacaggtgttgacaggattccgcgaaggctgcgctttctcttgagtaggattccaagaccgaaaggtctccaagcgataagtggcgcttgacatgttgtgtagagaaggcggcctaaagggttctttggagtctggtggttgggggaacaggggagaagacggggaaagggaaaggggagctgggagagggaggagagggaagaacttggaacgtgaattccaatgttgccatctgagaggaattggcgactcttttatgtatgaaaattgtccgcaaggccaatgccgccctttgcccagtacagaatatcccaatcagctcatatgacccaggccgcgggctctaagacgcaagtaacactagcgcaagtcgaaaaatgttgtagttccggccacggttcacgccaccattaacatcatgctagccctctgcccgtccttgatccgcatgatgcagcaccgatgtcaggtgcgtatgcggcatttccgctattggctcatcacaccgccgaactgtgatatcgaaggctccttgggtaggtgcagagttgaccgtggagaccgacgatgtctccggcggggcgaaaaagcattcgtgagcaggcaactcgaggatcagcgacgccagggctgtgcaatgtaacctcagacgggagctgacgtggctggtggagttgggtgcgcgggctcaaggatggtatccgggacattgcaatggcgaaggaggtcaggaaacgaatagcagaggctaggagctccgggccaggagctccggggggggggatcgagctannnnnnnnnnnnnnnnnnnnnnnnnnnnnnnnnnnnnnnnnnnnnnnnnnnnnnnnnnnnnnnnnnnnnnnnnnnnnnnnnnnnnnnnnnnnnnnnnnnnnnnnnnnnnnnnnnnnnnnnnnnnnnnnnnnnnnnnnnnnnnnnnnnnnnnnnnnnnnnnnnnnnnnnnnnnnnnnnnnnnnnnnnnnnnnnnnnnnnnnnnnnnnnnnnnnnnnnnnnnnnnnnnnnnnnnnnnnnnnnnnnnnnnnnnnnnnnnnnnnnnnnnnnnnnnnnnnnnnnnnnnnnnnnnnnnnnnnnnnnnnnnnnnnnnnnnnnnnnnnnnnnnnnnnnnnnnnnnnnnnnnnnnnnnnnnnnnnnnnnnnnnnnnnnnnnnnnnnnnnnnnnnnnnnnnnnnnnnnnnnnnnnnnnnnnnnnnnnnnnnnnnnnnnnnnnnnnnnnnnnnnnnnnnnnnnnnnnnnnnnnnnnnnnnnnnnnnnnnnnnnnnnnnnnnnnnnnnnnnnnnnnnnnnnnnnnnnnnnnnnnnnnnnnnnnnnnnnnnnnnnnnnnnnnnnnnnnnnnnnnnnnnnnnnnnnnnnnnnnnnnnnnnnnnnnnnnnnnnnnnnnnnnnnnnnnnnnnnnnnnnnnnnnnnnnnnnnnnnnnnnnnnnnnnnnnnnnnnnnnnnnnnnnnnnnnnnnnnnnnnnnnnnnnnnnnnnnnnnnnnnnnnnnnnnnnnnnnnnnnnnnnnnnnnnnnnnnnnnnnnnnnnnnnnnnnnnnnnnnnnnnnnnnnnnnnnnnnnnnnnnnnnnnnnnnnnnnnnnnnnnnnnnnnnnnnnnnnnnnnnnnnnnnnnnnnnnnnnnnnnnnnnnnnnnnnnnnnnnnnnnnnnnnnnnnnnnnnnnnnnnnnnnnnnnnnnnnnnnnnnnnnnnnnnnnnnnnnnnnnnnnnnnnnnnnnnnnnnnnnnnnnnnnnnnnnnnnnnnnnnnnnnnnnnnnnnnnnnnnnnnnnnnnnnnnnnnnnnnnnnnnnnnnnnnnnnnnnnnnnnnnnnnnnnnnnnnnnnnnnnnnnnnnnnnnnnnnnnnnnnnnnnnnnnnnnnnnnnnnnnnnnnnnnnnnnnnnnnnnnnnnnnnnnnnnnnnnnnnnnnnnnnnnnnnnnnnnnnnnnnnnnnnnnnnnnnnnnnnnnnnnnnnnnnnnnnnnnnnnnnnnnnnnnnnnnnnnnnnnnnnnnnnnnnnnnnnnnnnnnnnnnnnnnnnnnnnnnnnnnnnnnnnnnnnnnnnnnnnnnnnnnnnnnnnnnnnnnnnnnnnnnnnnnnnnnnnnnnnnnnnnnnnnnnnnnnnnnnnnnnnnnnnnnnnnnnnnnnnnnnnnnnnnnnnnnnnnnnnnnnnnnnnnnnnnnnnnnnnnnnnnnnnnnnnnnnnnnnnnnnnnnnnnnnnnnnnnnnnnnnnnnnnnnnnnnnnnnnnnnnnnnnnnnnnnnnnnnnnnnnnnnnnnnnnnnnnnnnnnnnnnnnnnnnnnnnnnnnnnnnnnnnnnnnnnnnnnnnnnnnnnnnnnnnnnnnnnnnnnnnnnnnnnnnnnnnnnnnnnnnnnnnnnnnnnnnnnnnnnnnnnnnnnnnnnnnnnnnnnnnnnnnnnnnnnnnnnnnnnnnnnnnnnnnnnnnnnnnnnnnnnnnnnnnnnnnnnnnnnnnnnnnnnnnnnnnnnnnnnnnnnnnnnnnnnnnnnnnnnnnnnnnnnnnnnnnnnnnnnnnnnnnnnnnnnnnnnnnnnnnnnnnnnnnnnnnnnnnnnnnnnnnnnnnnnnnnnnnnnnnnnnnnnnnnnnnnnnnnnnnnnnnnnnnnnnnnnnnnnnnnnnnnnnnnnnnnnnnnnnnnnnnnnnnnnnnnnnnnnnnnnnnnnnnnnnnnnnnnnnnnnnnnnnnnnnnnnnnnnnnnnnnnnnnnnnnnnnnnnnnnnnnnnnnnnnnnnnnnnnnnnnnnnnnnnnnnnnnnnnnnnnnnnnnnnnnnnnnnnnnnnnnnnnnnnnnnnnnnnnnnnnnnnnnnnnnnnnnnnnnnnnnnnnnnnnnnnnnnnnnnnnnnnnnnnnnnnnnnnnnnnnnnnnnnnnnnnnnnnnnnnnnnnnnnnnnnnnnnnnnnnnnnnnnnnnnnnnnnnnnnnnnnnnnnnnnnnnnnnnnnnnnnnnnnnnnnnnnnnnnnnnnnnnnnnnnnnnnnnnnnnnnnnnnnnnnnnnnnnnnnnnnnnnnnnnnnnnnnnnnnnnnnnnnnnnnnnnnnnnnnnnnnnnnnnnnnnnnnnnnnnnnnnnnnnnnnnnnnnnnnnnnnnnnnnnnnnnnnnnnnnnnnnnnnnnnnnnnnnnnnnnnnnnnnnnnnnnnnnnnnnnnnnnnnnnnnnnnnnnnnnnnnnnnnnnnnnnnnnnnnnnnnnnnnnnnnnnnnnnnnnnnnnnnnnnnnnnnnnnnnnnnnnnnnnnnnnnnnnnnnnnnnnnnnnnnnnnnnnnnnnnnnnnnnnnnnnnnnnnnnnnnnnnnnnnnnnnnnnnnnnnnnnnnnnnnnnnnnnnnnnnnnnnnnnnnnnnnnnnnnnnnnnnnnnnnnnnnnnnnnnnnnnnnnnnnnnnnnnnnnnnnnnnnnnnnnnnnnnnnnnnnnnnnnnnnnnnnnnnnnnnnnnnnnnnnnnnnnnnnnnnnnnnnnnnnnnnnnnnnnnnnnnnnnnnnnnnnnnnnnnnnnnnnnnnnnnnnnnnnnnnnnnnnnnnnnnnnnnnnnnnnnnnnnnnnnnnnnnnnnnnnnnnnnnnnnnnnnnnnnnnnnnnnnnnnnnnnnnnnnnnnnnnnnnnnnnnnnnnnnnnnnnnnnnnnnnnnnnnnnnnnnnnnnnnnnnnnnnnnnnnnnnnnnnnnnnnnnnnnnnnnnnnnnnnnnnnnnnnnnnnnnnnnnnnnnnnnnnnnnnnnnnnnnnnnnnnnnnnnnnnnnnnnnnnnnnnnnnnnnnnnnnnnnnnnnnnnnnnnnnnnnnnnnnnnnnnnnnnnnnnnnnnnnnnnnnnnnnnnnnnnnnnnnnnnnnnnnnnnnnnnnnnnnnnnnnnnnnnnnnnnnnnnnnnnnnnnnnnnnnnnnnnnnnnnnnnnnnnnnnnnnnnnnnnnnnnnnnnnnnnnnnnnnnnnnnnnnnnnnnnnnnnnnnnnnnnnnnnnnnnnnnnnnnnnnnnnnnnnnnnnnnnnnnnnnnnnnnnnnnnnnnnnnnnnnnnnnnnnnnnnnnnnnnnnnnnnnnnnnnnnnnnnnnnnnnnnnnnnnnnnnnnnnnnnnnnnnnnnnnnnnnnnnnnnnnnnnnnnnnnnnnnnnnnnnnnnnnnnnnnnnnnnnnnnnnnnnnnnnnnnnnnnnnnnnnnnnnnnnnnnnnnnnnnnnnnnnnnnnnnnnnnnnnnnnnnnnnnnnnnnnnnnnnnnnnnnnnnnnnnnnnnnnnnnnnnnnnnnnnnnnnnnnnnnnnnnnnnnnnnnnnnnnnnnnnnnnnnnnnnnnnnnnnnnnnnnnnnnnnnnnnnnnnnnnnnnnnnnnnnnnnnnnnnnnnnnnnnnnnnnnnnnnnnnnnnnnnnnnnnnnnnnnnnnnnnnnnnnnnnnnnnnnnnnnnnnnnnnnnnnnnnnnnnnnnnnncttctaggacttctacctatatcttataaataatccttaaaatatctactaagatagtatactagaatatagtactctatagtagaagtaatattaatctatacagatatttataatatagctcgatactatctatcgttatctaaagtacctatatagttaatagtactagaaggagtacctctaggccaaagtaatcgatatagtttatactaagtcgttaaaatggcctataaagctagaaatgtataaagtatatatcggatacctttctatagtagaaagtcaaatccccaactagtagaaatcgctttatatatagaaagagaaaagcgctagcggcagtaagaacgatactactaaattagatctaagcctagatactagtcttagctcttataccttatttatattaagaacaaagaaacgtaaggataggtttaaaactaaaggtaaggataagtagggcaataaacctaataagaagcgtaagtataataaataaaaaataaatcctaatagtattccctataataattactttaagtatagaaagctaggctactatatagatacctgtaaagagactaaaggggatttataattaaaaaactgattgccctagcgcttatagtatcggtagtattagggcttaacggtattaagtataagttaaaacttactttcgcttataaagttagtattaaaaccaataatagggagtaaactgtgtaggccctaattaatagtagagctgaaaagacctttataagctagaactaggttaaatagtaccttctatatannnnnnnnnnnnnnnnnnnnnnnnnnnnnnnnnnnnnnnnnnnnnnnnnnnnnnnnnnnnnnnnnnnnnnnnnnnnnnnnnnnnnnnnnnnnnnnnnnnnnnnnnnnnnnnnnnnnnnnnnnnnnnnnnnnnnnnnnnnnnnnnnnnnnnnnnnnnnnnnnnnnnnnnnnnnnnnnnnnnnnnnnnnnnnnnnnnnnnnnnnnnnnnnnnnnnnnnnnnnnnnnnnnnnnnnnnnnnnnnnnnnnnnnnnnnnnnnnnnnnnnnnnnnnnnnnnnnnnnnnnnnnnnnnnnnnnnnnnnnnnnnnnnnnnnnnnnnnnnnnnnnnnnnnnnnnnnnnnnnnnnnnnnnnnnnnnnnnnnnnnnnnnnnnnnnnnnnnnnnnnnnnnnnnnnnnnnnnnnnnnnnnnnnnnnnnnnnnnnnnnnnnnnnnnnnnnnnnnnnnnnnnnnnnnnnnnnnnnnnnnnnnnnnnnnnnnnnnnnnnnnnnnnnnnnnnnnnnnnnnnnnnnnnnnnnnnnnnnnnnnnnnnnnnnnnnnnnnnnnnnnnnnnnnnnnnnnnnnnnnnnnnnnnnnnnnnnnnnnnnnnnnnnnnnnnnnnnnnnnnnnnnnnnnnnnnnnnnnnnnnnnnnnnnnnnnnnnnnnnnnnnnnnnnnnnnnnnnnnnnnnnnnnnnnnnnnnnnnnnnnnnnnnnnnnnnnnnnnnnnnnnnnnnnnnnnnnnnnnnnnnnnnnnnnnnnnnnnnnnnnnnnnnnnnnnnnnnnnnnnnnnnnnnnnnnnnnnnnnnnnnnnnnnnnnnnnnnnnnnnnnnnnnnnnnnnnnnnnnnnnnnnnnnnnnnnnnnnnnnnnnnnnnnnnnnnnnnnnnnnnnnnnnnnnnnnnnnnnnnnnnnnnnnnnnnnnnnnnnnnnnnnnnnnnnnnnnnnnnnnnnnnnnnnnnnnnnnnnnnnnnnnnnnnnnnnnnnnnnnnnnnnnnnnnnnnnnnnnnnnnnnnnnnnnnnnnnnnnnnnnnnnnnnnnnnnnnnnnnnnnnnnnnnnnnnnnnnnnnnnnnnnnnnnnnnnnnnnnnnnnnnnnnnnnnnnnnnnnnnnnnnnnnnnnnnnnnnnnnnnnnnnnnnnnnnnnnnnnnnnnnnnnnnnnnnnnnnnnnnnnnnnnnnnnnnnnnnnnnnnnnnnnnnnnnnnnnnnnnnnnnnnnnnnnnnnnnnnnnnnnnnnnnnnnnnnnnnnnnnnnnnnnnnnnnnnnnnnnnnnnnnnnnnnnnnnnnnnnnnnnnnnnnnnnnnnnnnnnnnnnnnnnnnnnnnnnnnnnnnnnnnnnnnnnnnnnnnnnnnnnnnnnnnnnnnnnnnnnnnnnnnnnnnnnnnnnnnnnnnnnnnnnnnnnnnnnnnnnnnnnnnnnnnnnnnnnnnnnnnnnnnnnnnnnnnnnnnnnnnnnnnnnnnnnnnnnnnnnnnnnnnnnnnnnnnnnnnnnnnnnnnnnnnnnnnnnnnnnnnnnnnnnnnnnnnnnnnnnnnnnnnnnnnnnnnnnnnnnnnnnnnnnnnnnnnnnnnnnnnnnnnnnnnnnnnnnnnnnnnnnnnnnnnnnnnnnnnnnnnnnnnnnnnnnnnnnnnnnnnnnnnnnnnnnnnnnnnnnnnnnnnnnnnnnnnnnnnnnnnnnnnnnnnnnnnnnnnnnnnnnnnnnnnnnnnnnnnnnnnnnnnnnnnnnnnnnnnnnnnnnnnnnnnnnnnnnnnnnnnnnnnnnnnnnnnnnnnnnnnnnnnnnnnnnnnnnnnnnnnnnnnnnnnnnnnnnnnnnnnnnnnnnnnnnnnnnnnnnnnnnnnnnnnnnnnnnnnnnnnnnnnnnnnnnnnnnnnnnnnnnnnnnnnnnnnnnnnnnnnnnnnnnnnnnnnnnnnnnnnnnnnnnnnnnnnnnnnnnnnnnnnnnnnnnnnnnnnnnnnnnnnnnnnnnnnnnnnnnnnnnnnnnnnnnnnnnnnnnnnnnnnnnnnnnnnnnnnnnnnnnnnnnnnnnnnnnnnnnnnnnnnnnnnnnnnnnnnnnnnnnnnnnnnnnnnnnnnnnnnnnnnnnnnnnnnnnnnnnnnnnnnnnnnnnnnnnnnnnnnnnnnnnnnnnnnnnnnnnnnnnnnnnnnnnnnnnnnnnnnnnnnnnnnnnnnnnnnnnnnnnnnnnnnnnnnnnnnnnnnnnnnnnnnnnnnnnnnnnnnnnnnnnnnnnnnnnnnnnnnnnnnnnnnnnnnnnnnnnnnnnnnnnnnnnnnnnnnnnnnnnnnnnnnnnnnnnnnnnnnnnnnnnnnnnnnnnnnnnnnnnnnnnnnnnnnnnnnnnnnnnnnnnnnnnnnnnnnnnnnnnnnnnnnnnnnnnnnnnnnnnnnnnnnnnnnnnnnnnnnnnnnnnnnnnnnnnnnnnnnnnnnnnnnnnnnnnnnnnnnnnnnnnnnnnnnnnnnnnnnnnnnnnnnnnnnnnnnnnnnnnnnnnnnnnnnnnnnnnnnnnnnnnnnnnnnnnnnnnnnnnnnnnnnnnnnnnnnnnnnnnnnnnnnnnnnnnnnnnnnnnnnnnnnnnnnnnnnnnnnnnnnnnnnnnnnnnnnnnnnnnnnnnnnnnnnnnnnnnnnnnnnnnnnnnnnnnnnnnnnnnnnnnnnnnnnnnnnnnnnnnnnnnnnnnnnnnnnnnnnnnnnnnnnnnnnnnnnnnnnnnnnnnnnnnnnnnnnnnnnnnnnnnnnnnnnnnnnnnnnnnnnnnnnnnnnnnnnnnnnnnnnnnnnnnnnnnnnnnnnnnnnnnnnnnnnnnnnnnnnnnnnnnnnnnnnnnnnnnnnnnnnnnnnnnnnnnnnnnnnnnnnnnnnnnnnnnnnnnnnnnnnnnnnnnnnnnnnnnnnnnnnnnnnnnnnnnnnnnnnnnnnnnnnnnnnnnnnnnnnnnnnnnnnnnnnnnnnnnnnnnnnnnnnnnnnnnnnnnnnnnnnnnnnnnnnnnnnnnnnnnnnnnnnnnnnnnnnnnnnnnnnnnnnnnnnnnnnnnnnnnnnnnnnnnnnnnnnnnnnnnnnnnnnnnnnnnnnnnnnnnnnnnnnnnnnnnnnnnnnnnnnnnnnnnnnnnnnnnnnnnnnnnnnnnnnnnnnnnnnnnnnnnnnnnnnnnnnnnnnnnnnnnnnnnnnnnnnnnnnnnnnnnnnnnnnnnnnnnnnnnnnnnnnnnnnnnnnnnnnnnnnnnnnnnnnnnnnnnnnnnnnnnnnnnnnnnnnnnnnnnnnnnnnnnnnnnnnnnnnnnnnnnnnnnnnnnnnnnnnnnnnnnnnnnnnnnnnnnnnnnnnnnnnnnnnnnnnnnnnnnnnnnnnnnnnnnnnnnnnnnnnnnnnnnnnnnnnnnnnnnnnnnnnnnnnnnnnnnnnnnnnnnnnnnnnnnnnnnnnnnnnnnnnnnnnnnnnnnnnnnnnnnnnnnnnnnnnnnnnnnnnnnnnnnnnnnnnnnnnnnnnnnnnnnnnnnnnnnnnnnnnnnnnnnnnnnnnnnnnnnnnnnnnnnnnnnnnnnnnnnnnnnnnnnnnnnnnnnnnnnnnnnnnnnnnnnnnnnnnnnnnnnnnnnnnnnnnnnnnnnnnnnnnnnnnnnnnnnnnnnnnnnnnnnnnnnnnnnnnnnnnnnnnnnnnnnnnnnnnnnnnnnnnnnnnnnnnnnnnnnnnnnnnnnnnnnnnnnnnnnnnnnnnnnnnnnnnnnnnnnnnnnnnnnnnnnnnnnnnnnnnnnnnnnnnnnnnnnnnnnnnnnnnnnnnnnnnnnnnnnnnnnnnnnnnnnnnnnnnnnnnnnnnnnnnnnnnnnnnnnnnnnnnnnnnnnnnnnnnnnnnnnnnnnnnnnnnnnnnnnnnnnnnnnnnnnnnnnnnnnnnnnnnnnnnnnnnnnnnnnnnnnnnnnnnnnnnnnnnnnnnnnnnnnnnnnnnnnnnnnnnnnnnnnnnnnnnnnnnnnnnnnnnnnnnnnnnnnnnnnnnnnnnnnnnnnnnnnnnnnnnnnnnnnnnnnnnnnnnnnnnnnnnnnnnnnnnnnnnnnnnnnnnnnnnnnnnnnnnnnnnnnnnnnnnnnnnnnnnnnnnnnnnnnnnnnnnnnnnnnnnnnnnnnnnnnnnnnnnnnnnnnnnnnnnnnnnnnnnnnnnnnnnnnnnnnnnnnnnnnnnnnnnnnnnnnnnnnnnnnnnnnnnnnnnnnnnnnnnnnnnnnnnnnnnnnnnnnnnnnnnnnnnnnnnnnnnnnnnnnnnnnnnnnnnnnnnnnnnnnnnnnnnnnnnnnnnnnnnnnnnnnnnnnnnnnnnnnnnnnnnnnnnnnnnnnnnnnnnnnnnnnnnnnnnnnnnnnnnnnnnnnnnnnnnnnnnnnnnnnnnnnnnnnnnnnnnnnnnnnnnnnnnnnnnnnnnnnnnnnnnnnnnnnnnnnnnnnnnnnnnnnnnnnnnnnnnnnnnnnnnnnnnnnnnnnnnnnnnnnnnnnnnnnnnnnnnnnnnnnnnnnnnnnnnnnnnnnnnnnnnnnnnnnnnnnnnnnnnnnnnnnnnnnnnnnnnnnnnnnnnnnnnnnnnnnnnnnnnnnnnnnnnnnnnnnnnnnnnnnnnnnnnnnnnnnnnnnnnnnnnnnnnnnnnnnnnnnnnnnnnnnnnnnnnnnnnnnnnnnnnnnnnnnnnnnnnnnnnnnnnnnnnnnnnnnnnnnnnnnnnnnnnnnnnnnnnnnnnnnnnnnnnnnnnnnnnnnnnnnnnnnnnnnnnnnnnnnnnnnnnnnnnnnnnnnnnnnnnnnnnnnnnnnnnnnnnnnnnnnnnnnnnnnnnnnnnnnnnnnnnnnnnnnnnnnnnnnnnnnnnnnnnnnnnnnnnnnnnnnnnnnnnnnnnnnnnnnnnnnnnnnnnnnnnnnnnnnnnnnnnnnnnnnnnnnnnnnnnnnnnnnnnnnnnnnnnnnnnnnnnnnnnnnnnnnnnnnnnnnnnnnnnnnnnnnnnnnnnnnnnnnnnnnnnnnnnnnnnnnnnnnnnnnnnnnnnnnnnnnnnnnnnnnnnnnnnnnnnnnnnnnnnnnnnnnnnnnnnnnnnnnnnnnnnnnnnnnnnnnnnnnnnnnnnnnnnnnnnnnnnnnnnnnnnnnnnnnnnnnnnnnnnnnnnnnnnnnnnnnnnnnnnnnnnnnnnnnnnnnnnnnnnnnnnnnnnnnnnnnnnnnnnnnnnnnnnnnnnnnnnnnnnnnnnnnnnnnnnnnnnnnnnnnnnnnnnnnnnnnnnnnnnnnnnnnnnnnnnnnnnnnnnnnnnnnnnnnnnnnnnnnnnnnnnnnnnnnnnnnnnnnnnnnnnnnnnnnnnnnnnnnnnnnnnnnnnnnnnnnnnnnnnnnnnnnnnnnnnnnnnnnnnnnnnnnnnnnnnnnnnnnnnnnnnnnnnnnnnnnnnnnnnnnnnnnnnnnnnnnnnnnnnnnnnnnnnnnnnnnnnnnnnnnnnnnnnnnnnnnnnnnnnnnnnnnnnnnnnnnnnnnnnnnnnnnnnnnnnnnnnnnnnnnnnnnnnnnnnnnnnnnnnnnnnnnnnnnnnnnnnnnnnnnnnnnnnnnnnnnnnnnnnnnnnnnnnnnnnnnnnnnnnnnnnnnnnnnnnnnnnnnnnnnnnnnnnnnnnnnnnnnnnnnnnnnnnnnnnnnnnnnnnnnnnnnnnnnnnnnnnnnnnnnnnnnnnnnnnnnnnnnnnnnnnnnnnnnnnnnnnnnnnnnnnnnnnnnnnnnnnnnnnnnnnnnnnnnnnnnnnnnnnnnnnnnnnnnnnnnnnnnnnnnnnnnnnnnnnnnnnnnnnnnnnnnnnnnnnnnnnnnnnnnnnnnnnnnnnnnnnnnnnnnnnnnnnnnnnnnnnnnnnnnnnnnnnnnnnnnnnnnnnnnnnnnnnnnnnnnnnnnnnnnnnnnnnnnnnnnnnnnnnnnnnnnnnnnnnnnnnnnnnnnnnnnnnnnnnnnnnnnnnnnnnnnnnnnnnnnnnnnnnnnnnnnnnnnnnnnnnnnnnnnnnnnnnnnnnnnnnnnnnnnnnnnnnnnnnnnnnnnnnnnnnnnnnnnnnnnnnnnnnnnnnnnnnnnnnnnnnnnnnnnnnnnnnnnnnnnnnnnnnnnnnnnnnnnnnnnnnnnnnnnnnnnnnnnnnnnnnnnnnnnnnnnnnnnnnnnnnnnnnnnnnnnnnnnnnnnnnnnnnnnnnnnnnnnnnnnnnnnnnnnnnnnnnnnnnnnnnnnnnnnnnnnnnnnnnnnnnnnnnnnnnnnnnnnnnnnnnnnnnnnnnnnnnnnnnnnnnnnnnnnnnnnnnnnnnnnnnnnnnnnnnnnnnnnnnnnnnnnnnnnnnnnnnnnnnnnnnnnnnnnnnnnnnnnnnnnnnnnnnnnnnnnnnnnnnnnnnnnnnnnnnnnnnnnnnnnnnnnnnnnnnnnnnnnnnnnnnnnnnnnnnnnnnnnnnnnnnnnnnnnnnnnnnnnnnnnnnnnnnnnnnnnnnnnnnnnnnnnnnnnnnnnnnnnnnnnnnnnnnnnnnnnnnnnnnnnnnnnnnnnnnnnnnnnnnnnnnnnnnnnnnnnnnnnnnnnnnnnnnnnnnnnnnnnnnnnnnnnnnnnnnnnnnnnnnnnnnnnnnnnnnnnnnnnnnnnnnnnnnnnnnnnnnnnnnnnnnnnnnnnnnnnnnnnnnnnnnnnnnnnnnnnnnnnnnnnnnnnnnnnnnnnnnnnnnnnnnnnnnnnnnnnnnnnnnnnnnnnnnnnnnnnnnnnnnnnnnnnnnnnnnnnnnnnnnnnnnnnnnnnnnnnnnnnnnnnnnnnnnnnnnnnnnnnnnnnnnnnnnnnnnnnnnnnnnnnnnnnnnnnnnnnnnnnnnnnnnnnnnnnnnnnnnnnnnnnnnnnnnnnnnnnnnnnnnnnnnnnnnnnnnnnnnnnnnnnnnnnnnnnnnnnnnnnnnnnnnnnnnnnnnnnnnnnnnnnnnnnnnnnnnnnnnnnnnnnnnnnnnnnnnnnnnnnnnnnnnnnnnnnnnnnnnnnnnnnnnnnnnnnnnnnnnnnnnnnnnnnnnnnnnnnnnnnnnnnnnnnnnnnnnnnnnnnnnnnnnnnnnnnnnnnnnnnnnnnnnnnnnnnnnnnnnnnnnnnnnnnnnnnnnnnnnnnnnnnnnnnnnnnnnnnnnnnnnnnnnnnnnnnnnnnnnnnnnnnnnnnnnnnnnnnnnnnnnnnnnnnnnnnnnnnnnnnnnnnnnnnnnnnnnnnnnnnnnnnnnnnnnnnnnnnnnnnnnnnnnnnnnnnnnnnnnnnnnnnnnnnnnnnnnnnnnnnnnnnnnnnnnnnnnnnnnnnnnnnnnnnnnnnnnnnnnnnnnnnnnnnnnnnnnnnnnnnnnnnnnnnnnnnnnnnnnnnnnnnnnnnnnnnnnnnnnnnnnnnnnnnnnnnnnnnnnnnnnnnnnnnnnnnnnnnnnnnnnnnnnnnnnnnnnnnnnnnnnnnnnnnnnnnnnnnnnnnnnnnnnnnnnnnnnnnnnnnnnnnnnnnnnnnnnnnnnnnnnnnnnnnnnnnnnnnnnnnnnnnnnnnnnnnnnnnnnnnnnnnnnnnnnnnnnnnnnnnnnnnnnnnnnnnnnnnnnnnnnnnnnnnnnnnnnnnnnnnnnnnnnnnnnnnnnnnnnnnnnnnnnnnnnnnnnnnnnnnnnnnnnnnnnnnnnnnnnnnnnnnnnnnnnnnnnnnnnnnnnnnnnnnnnnnnnnnnnnnnnnnnnnnnnnnnnnnnnnnnnnnnnnnnnnnnnnnnnnnnnnnnnnnnnnnnnnnnnnnnnnnnnnnnnnnnnnnnnnnnnnnnnnnnnnnnnnnnnnnnnnnnnnnnnnnnnnnnnnnnnnnnnnnnnnnnnnnnnnnnnnnnnnnnnnnnnnnnnnnnnnnnnnnnnnnnnnnnnnnnnnnnnnnnnnnnnnnnnnnnnnnnnnnnnnnnnnnnnnnnnnnnnnnnnnnnnnnnnnnnnnnnnnnnnnnnnnnnnnnnnnnnnnnnnnnnnnnnnnnnnnnnnnnnnnnnnnnnnnnnnnnnnnnnnnnnnnnnnnnnnnnnnnnnnnnnnnnnnnnnnnnnnnnnnnnnnnnnnnnnnnnnnnnnnnnnnnnnnnnnnnnnnnnnnnnnnnnnnnnnnnnnnnnnnnnnnnnnnnnnnnnnnnnnnnnnnnnnnnnnnnnnnnnnnnnnnnnnnnnnnnnnnnnnnnnnnnnnnnnnnnnnnnnnnnnnnnnnnnnnnnnnnnnnnnnnnnnnnnnnnnnnnnnnnnnnnnnnnnnnnnnnnnnnnnnnnnnnnnnnnnnnnnnnnnnnnnnnnnnnnnnnnnnnnnnnnnnnnnnnnnnnnnnnnnnnnnnnnnnnnnnnnnnnnnnnnnnnnnnnnnnnnnnnnnnnnnnnnnnnnnnnnnnnnnnnnnnnnnnnnnnnnnnnnnnnnnnnnnnnnnnnnnnnnnnnnnnnnnnnnnnnnnnnnnnnnnnnnnnnnnnnnnnnnnnnnnnnnnnnnnnnnnnnnnnnnnnnnnnnnnnnnnnnnnnnnnnnnnnnnnnnnnnnnnnnnnnnnnnnnnnnnnnnnnnnnnnnnnnnnnnnnnnnnnnnnnnnnnnnnnnnnnnnnnnnnnnnnnnnnnnnnnnnnnnnnnnnnnnnnnnnnnnnnnnnnnnnnnnnnnnnnnnnnnnnnnnnnnnnnnnnnnnnnnnnnnnnnnnnnnnnnnnnnnnnnnnnnnnnnnnnnnnnnnnnnnnnnnnnnnnnnnnnnnnnnnnnnnnnnnnnnnnnnnnnnnnnnnnnnnnnnnnnnnnnnnnnnnnnnnnnnnnnnnnnnnnnnnnnnnnnnnnnnnnnnnnnnnnnnnnnnnnnnnnnnnnnnnnnnnnnnnnnnnnnnnnnnnnnnnnnnnnnnnnnnnnnnnnnnnnnnnnnnnnnnnnnnnnnnnnnnnnnnnnnnnnnnnnnnnnnnnnnnnnnnnnnnnnnnnnnnnnnnnnnnnnnnnnnnnnnnnnnnnnnnnnnnnnnnnnnnnnnnnnnnnnnnnnnnnnnnnnnnnnnnnnnnnnnnnnnnnnnnnnnnnnnnnnnnnnnnnnnnnnnnnnnnnnnnnnnnnnnnnnnnnnnnnnnnnnnnnnnnnnnnnnnnnnnnnnnnnnnnnnnnnnnnnnnnnnnnnnnnnnnnnnnnnnnnnnnnnnnnnnnnnnnnnnnnnnnnnnnnnnnnnnnnnnnnnnnnnnnnnnnnnnnnnnnnnnnnnnnnnnnnnnnnnnnnnnnnnnnnnnnnnnnnnnnnnnnnnnnnnnnnnnnnnnnnnnnnnnnnnnnnnnnnnnnnnnnnnnnnnnnnnnnnnnnnnnnnnnnnnnnnnnnnnnnnnnnnnnnnnnnnnnnnnnnnnnnnnnnnnnnnnnnnnnnnnnnnnnnnnnnnnnnnnnnnnnnnnnnnnnnnnnnnnnnnnnnnnnnnnnnnnnnnnnnnnnnnnnnnnnnnnnnnnnnnnnnnnnnnnnnnnnnnnnnnnnnnnnnnnnnnnnnnnnnnnnnnnnnnnnnnnnnnnnnnnnnnnnnnnnnnnnnnnnnnnnnnnnnnnnnnnnnnnnnnnnnnnnnnnnnnnnnnnnnnnnnnnnnnnnnnnnnnnnnnnnnnnnnnnnnnnnnnnnnnnnnnnnnnnnnnnnnnnnnnnnnnnnnnnnnnnnnnnnnnnnnnnnnnnnnnnnnnnnnnnnnnnnnnnnnnnnnnnnnnnnnnnnnnnnnnnnnnnnnnnnnnnnnnnnnnnnnnnnnnnnnnnnnnnnnnnnnnnnnnnnnnnnnnnnnnnnnnnnnnnnnnnnnnnnnnnnnnnnnnnnnnnnnnnnnnnnnnnnnnnnnnnnnnnnnnnnnnnnnnnnnnnnnnnnnnnnnnnnnnnnnnnnnnnnnnnnnnnnnnnnnnnnnnnnnnnnnnnnnnnnnnnnnnnnnnnnnnnnnnnnnnnnnnnnnnnnnnnnnnnnnnnnnnnnnnnnnnnnnnnnnnnnnnnnnnnnnnnnnnnnnnnnnnnnnnnnnnnnnnnnnnnnnnnnnnnnnnnnnnnnnnnnnnnnnnnnnnnnnnnnnnnnnnnnnnnnnnnnnnnnnnnnnnnnnnnnnnnnnnnnnnnnnnnnnnnnnnnnnnnnnnnnnnnnnnnnnnnnnnnnnnnnnnnnnnnnnnnnnnnnnnnnnnnnnnnnnnnnnnnnnnnnnnnnnnnnnnnnnnnnnnnnnnnnnnnnnnnnnnnnnnnnnnnnnnnnnnnnnnnnnnnnnnnnnnnnnnnnnnnnnnnnnnnnnnnnnnnnnnnnnnnnnnnnnnnnnnnnnnnnnnnnnnnnnnnnnnnnnnnnnnnnnnnnnnnnnnnnnnnnnnnnnnnnnnnnnnnnnnnnnnnnnnnnnnnnnnnnnnnnnnnnnnnnnnnnnnnnnnnnnnnnnnnnnnnnnnnnnnnnnnnnnnnnnnnnnnnnnnnnnnnnnnnnnnnnnnnnnnnnnnnnnnnnnnnnnnnnnnnnnnnnnnnnnnnnnnnnnnnnnnnnnnnnnnnnnnnnnnnnnnnnnnnnnnnnnnnnnnnnnnnnnnnnnnnnnnnnnnnnnnnnnnnnnnnnnnnnnnnnnnnnnnnnnnnnnnnnnnnnnnnnnnnnnnnnnnnnnnnnnnnnnnnnnnnnnnnnnnnnnnnnnnnnnnnnnnnnnnnnnnnnnnnnnnnnnnnnnnnnnnnnnnnnnnnnnnnnnnnnnnnnnnnnnnnnnnnnnnnnnnnnnnnnnnnnnnnnnnnnnnnnnnnnnnnnnnnnnnnnnnnnnnnnnnnnnnnnnnnnnnnnnnnnnnnnnnnnnnnnnnnnnnnnnnnnnnnnnnnnnnnnnnnnnnnnnnnnnnnnnnnnnnnnnnnnnnnnnnnnnnnnnnnnnnnnnnnnnnnnnnnnnnnnnnnnnnnnnnnnnnnnnnnnnnnnnnnnnnnnnnnnnnnnnnnnnnnnnnnnnnnnnnnnnnnnnnnnnnnnnnnnnnnnnnnnnnnnnnnnnnnnnnnnnnnnnnnnnnnnnnnnnnnnnnnnnnnnnnnnnnnnnnnnnnnnnnnnnnnnnnnnnnnnnnnnnnnnnnnnnnnnnnnnnnnnnnnnnnnnnnnnnnnnnnnnnnnnnnnnnnnnnnnnnnnnnnnnnnnnnnnnnnnnnnnnnnnnnnnnnnnnnnnnnnnnnnnnnnnnnnnnnnnnnnnnnnnnnnnnnnnnnnnnnnnnnnnnnnnnnnnnnnnnnnnnnnnnnnnnnnnnnnnnnnnnnnnnnnnnnnnnnnnnnnnnnnnnnnnnnnnnnnnnnnnnnnnnnnnnnnnnnnnnnnnnnnnnnnnnnnnnnnnnnnnnnnnnnnnnnnnnnnnnnnnnnnnnnnnnnnnnnnnnnnnnnnnnnnnnnnnnnnnnnnnnnnnnnnnnnnnnnnnnnnnnnnnnnnnnnnnnnnnnnnnnnnnnnnnnnnnnnnnnnnnnnnnnnnnnnnnnnnnnnnnnnnnnnnnnnnnnnnnnnnnnnnnnnnnnnnnnnnnnnnnnnnnnnnnnnnnnnnnnnnnnnnnnnnnnnnnnnnnnnnnnnnnnnnnnnnnnnnnnnnnnnnnnnnnnnnnnnnnnnnnnnnnnnnnnnnnnnnnnnnnnnnnnnnnnnnnnnnnnnnnnnnnnnnnnnnnnnnnnnnnnnnnnnnnnnnnnnnnnnnnnnnnnnnnnnnnnnnnnnnnnnnnnnnnnnnnnnnnnnnnnnnnnnnnnnnnnnnnnnnnnnnnnnnnnnnnnnnnnnnnnnnnnnnnnnnnnnnnnnnnnnnnnnnnnnnnnnnnnnnnnnnnnnnnnnnnnnnnnnnnnnnnnnnnnnnnnnnnnnnnnnnnnnnnnnnnnnnnnnnnnnnnnnnnnnnnnnnnnnnnnnnnnnnnnnnnnnnnnnnnnnnnnnnnnnnnnnnnnnnnnnnnnnnnnnnnnnnnnnnnnnnnnnnnnnnnnnnnnnnnnnnnnnnnnnnnnnnnnnnnnnnnnnnnnnnnnnnnnnnnnnnnnnnnnnnnnnnnnnnnnnnnnnnnnnnnnnnnnnnnnnnnnnnnnnnnnnnnnnnnnnnnnnnnnnnnnnnnnnnnnnnnnnnnnnnnnnnnnnnnnnnnnnnnnnnnnnnnnnnnnnnnnnnnnnnnnnnnnnnnnnnnnnnnnnnnnnnnnnnnnnnnnnnnnnnnnnnnnnnnnnnnnnnnnnnnnnnnnnnnnnnnnnnnnnnnnnnnnnnnnnnnnnnnnnnnnnnnnnnnnnnnnnnnnnnnnnnnnnnnnnnnnnnnnnnnnnnnnnnnnnnnnnnnnnnnnnnnnnnnnnnnnnnnnnnnnnnnnnnnnnnnnnnnnnnnnnnnnnnnnnnnnnnnnnnnnnnnnnnnnnnnnnnnnnnnnnnnnnnnnnnnnnnnnnnnnnnnnnnnnnnnnnnnnnnnnnnnnnnnnnnnnnnnnnnnnnnnnnnnnnnnnnnnnnnnnnnnnnnnnnnnnnnnnnnnnnnnnnnnnnnnnnnnnnnnnnnnnnnnnnnnnnnnnnnnnnnnnnnnnnnnnnnnnnnnnnnnnnnnnnnnnnnnnnnnnnnnnnnnnnnnnnnnnnnnnnnnnnnnnnnnnnnnnnnnnnnnnnnnnnnnnnnnnnnnnnnnnnnnnnnnnnnnnnnnnnnnnnnnnnnnnnnnnnnnnnnnnnnnnnnnnnnnnnnnnnnnnnnnnnnnnnnnnnnnnnnnnnnnnnnnnnnnnnnnnnnnnnnnnnnnnnnnnnnnnnnnnnnnnnnnnnnnnnnnnnnnnnnnnnnnnnnnnnnnnnnnnnnnnnnnnnnnnnnnnnnnnnnnnnnnnnnnnnnnnnnnnnnnnnnnnnnnnnnnnnnnnnnnnnnnnnnnnnnnnnnnnnnnnnnnnnnnnnnnnnnnnnnnnnnnnnnnnnnnnnnnnnnnnnnnnnnnnnnnnnnnnnnnnnnnnnnnnnnnnnnnnnnnnnnnnnnnnnnnnnnnnnnnnnnnnnnnnnnnnnnnnnnnnnnnnnnnnnnnnnnnnnnnnnnnnnnnnnnnnnnnnnnnnnnnnnnnnnnnnnnnnnnnnnnnnnnnnnnnnnnnnnnnnnnnnnnnnnnnnnnnnnnnnnnnnnnnnnnnnnnnnnnnnnnnnnnnnnnnnnnnnnnnnnnnnnnnnnnnnnnnnnnnnnnnnnnnnnnnnnnnnnnnnnnnnnnnnnnnnnnnnnnnnnnnnnnnnnnnnnnnnnnnnnnnnnnnnnnnnnnnnnnnnnnnnnnnnnnnnnnnnnnnnnnnnnnnnnnnnnnnnnnnnnnnnnnnnnnnnnnnnnnnnnnnnnnnnnnnnnnnnnnnnnnnnnnnnnnnnnnnnnnnnnnnnnnnnnnnnnnnnnnnnnnnnnnnnnnnnnnnnnnnnnnnnnnnnnnnnnnnnnnnnnnnnnnnnnnnnnnnnnnnnnnnnnnnnnnnnnnnnnnnnnnnnnnnnnnnnnnnnnnnnnnnnnnnnnnnnnnnnnnnnnnnnnnnnnnnnnnnnnnnnnnnnnnnnnnnnnnnnnnnnnnnnnnnnnnnnnnnnnnnnnnnnnnnnnnnnnnnnnnnnnnnnnnnnnnnnnnnnnnnnnnnnnnnnnnnnnnnnnnnnnnnnnnnnnnnnnnnnnnnnnnnnnnnnnnnnnnnnnnnnnnnnnnnnnnnnnnnnnnnnnnnnnnnnnnnnnnnnnnnnnnnnnnnnnnnnnnnnnnnnnnnnnnnnnnnnnnnnnnnnnnnnnnnnnnnnnnnnnnnnnnnnnnnnnnnnnnnnnnnnnnnnnnnnnnnnnnnnnnnnnnnnnnnnnnnnnnnnnnnnnnnnnnnnnnnnnnnnnnnnnnnnnnnnnnnnnnnnnnnnnnnnnnnnnnnnnnnnnnnnnnnnnnnnnnnnnnnnnnnnnnnnnnnnnnnnnnnnnnnnnnnnnnnnnnnnnnnnnnnnnnnnnnnnnnnnnnnnnnnnnnnnnnnnnnnnnnnnnnnnnnnnnnnnnnnnnnnnnnnnnnnnnnnnnnnnnnnnnnnnnnnnnnnnnnnnnnnnnnnnnnnnnnnnnnnnnnnnnnnnnnnnnnnnnnnnnnnnnnnnnnnnnnnnnnnnnnnnnnnnnnnnnnnnnnnnnnnnnnnnnnnnnnnnnnnnnnnnnnnnnnnnnnnnnnnnnnnnnnnnnnnnnnnnnnnnnnnnnnnnnnnnnnnnnnnnnnnnnnnnnnnnnnnnnnnnnnnnnnnnnnnnnnnnnnnnnnnnnnnnnnnnnnnnnnnnnnnnnnnnnnnnnnnnnnnnnnnnnnnnnnnnnnnnnnnnnnnnnnnnnnnnnnnnnnnnnnnnnnnnnnnnnnnnnnnnnnnnnnnnnnnnnnnnnnnnnnnnnnnnnnnnnnnnnnnnnnnnnnnnnnnnnnnnnnnnnnnnnnnnnnnnnnnnnnnnnnnnnnnnnnnnnnnnnnnnnnnnnnnnnnnnnnnnnnnnnnnnnnnnnnnnnnnnnnnnnnnnnnnnnnnnnnnnnnnnnnnnnnnnnnnnnnnnnnnnnnnnnnnnnnnnnnnnnnnnnnnnnnnnnnnnnnnnnnnnnnnnnnnnnnnnnnnnnnnnnnnnnnnnnnnnnnnnnnnnnnnnnnnnnnnnnnnnnnnnnnnnnnnnnnnnnnnnnnnnnnnnnnnnnnnnnnnnnnnnnnnnnnnnnnnnnnnnnnnnnnnnnnnnnnnnnnnnnnnnnnnnnnnnnnnnnnnnnnnnnnnnnnnnnnnnnnnnnnnnnnnnnnnnnnnnnnnnnnnnnnnnnnnnnnnnnnnnnnnnnnnnnnnnnnnnnnnnnnnnnnnnnnnnnnnnnnnnnnnnnnnnnnnnnnnnnnnnnnnnnnnnnnnnnnnnnnnnnnnnnnnnnnnnnnnnnnnnnnnnnnnnnnnnnnnnnnnnnnnnnnnnnnnnnnnnnnnnnnnnnnnnnnnnnnnnnnnnnnnnnnnnnnnnnnnnnnnnnnnnnnnnnnnnnnnnnnnnnnnnnnnnnnnnnnnnnnnnnnnnnnnnnnnnnnnnnnnnnnnnnnnnnnnnnnnnnnnnnnnnnnnnnnnnnnnnnnnnnnnnnnnnnnnnnnnnnnnnnnnnnnnnnnnnnnnnnnnnnnnnnnnnnnnnnnnnnnnnnnnnnnnnnnnnnnnnnnnnnnnnnnnnnnnnnnnnnnnnnnnnnnnnnnnnnnnnnnnnnnnnnnnnnnnnnnnnnnnnnnnnnnnnnnnnnnnnnnnnnnnnnnnnnnnnnnnnnnnnnnnnnnnnnnnnnnnnnnnnnnnnnnnnnnnnnnnnnnnnnnnnnnnnnnnnnnnnnnnnnnnnnnnnnnnnnnnnnnnnnnnnnnnnnnnnnnnnnnnnnnnnnnnnnnnnnnnnnnnnnnnnnnnnnnnnnnnnnnnnnnnnnnnnnnnnnnnnnnnnnnnnnnnnnnnnnnnnnnnnnnnnnnnnnnnnnnnnnnnnnnnnnnnnnnnnnnnnnnnnnnnnnnnnnnnnnnnnnnnnnnnnnnnnnnnnnnnnnnnnnnnnnnnnnnnnnnnnnnnnnnnnnnnnnnnnnnnnnnnnnnnnnnnnnnnnnnnnnnnnnnnnnnnnnnnnnnnnnnnnnnnnnnnnnnnnnnnnnnnnnnnnnnnnnnnnnnnnnnnnnnnnnnnnnnnnnnnnnnnnnnnnnnnnnnnnnnnnnnnnnnnnnnnnnnnnnnnnnnnnnnnnnnnnnnnnnnnnnnnnnnnnnnnnnnnnnnnnnnnnnnnnnnnnnnnnnnnnnnnnnnnnnnnnnnnnnnnnnnnnnnnnnnnnnnnnnnnnnnnnnnnnnnnnnnnnnnnnnnnnnnnnnnnnnnnnnnnnnnnnnnnnnnnnnnnnnnnnnnnnnnnnnnnnnnnnnnnnnnnnnnnnnnnnnnnnnnnnnnnnnnnnnnnnnnnnnnnnnnnnnnnnnnnnnnnnnnnnnnnnnnnnnnnnnnnnnnnnnnnnnnnnnnnnnnnnnnnnnnnnnnnnnnnnnnnnnnnnnnnnnnnnnnnnnnnnnnnnnnnnnnnnnnnnnnnnnnnnnnnnnnnnnnnnnnnnnnnnnnnnnnnnnnnnnnnnnnnnnnnnnnnnnnnnnnnnnnnnnnnnnnnnnnnnnnnnnnnnnnnnnnnnnnnnnnnnnnnnnnnnnnnnnnnnnnnnnnnnnnnnnnnnnnnnnnnnnnnnnnnnnnnnnnnnnnnnnnnnnnnnnnnnnnnnnnnnnnnnnnnnnnnnnnnnnnnnnnnnnnnnnnnnnnnnnnnnnnnnnnnnnnnnnnnnnnnnnnnnnnnnnnnnnnnnnnnnnnnnnnnnnnnnnnnnnnnnnnnnnnnnnnnnnnnnnnnnnnnnnnnnnnnnnnnnnnnnnnnnnnnnnnnnnnnnnnnnnnnnnnnnnnnnnnnnnnnnnnnnnnnnnnnnnnnnnnnnnnnnnnnnnnnnnnnnnnnnnnnnnnnnnnnnnnnnnnnnnnnnnnnnnnnnnnnnnnnnnnnnnnnnnnnnnnnnnnnnnnnnnnnnnnnnnnnnnnnnnnnnnnnnnnnnnnnnnnnnnnnnnnnnnnnnnnnnnnnnnnnnnnnnnnnnnnnnnnnnnnnnnnnnnnnnnnnnnnnnnnnnnnnnnnnnnnnnnnnnnnnnnnnnnnnnnnnnnnnnnnnnnnnnnnnnnnnnnnnnnnnnnnnnnnnnnnnnnnnnnnnnnnnnnnnnnnnnnnnnnnnnnnnnnnnnnnnnnnnnnnnnnnnnnnnnnnnnnnnnnnnnnnnnnnnnnnnnnnnnnnnnnnnnnnnnnnnnnnnnnnnnnnnnnnnnnnnnnnnnnnnnnnnnnnnnnnnnnnnnnnnnnnnnnnnnnnnnnnnnnnnnnnnnnnnnnnnnnnnnnnnnnnnnnnnnnnnnnnnnnnnnnnnnnnnnnnnnnnnnnnnnnnnnnnnnnnnnnnnnnnnnnnnnnnnnnnnnnnnnnnnnnnnnnnnnnnnnnnnnnnnnnnnnnnnnnnnnnnnnnnnnnnnnnnnnnnnnnnnnnnnnnnnnnnnnnnnnnnnnnnnnnnnnnnnnnnnnnnnnnnnnnnnnnnnnnnnnnnnnnnnnnnnnnnnnnnnnnnnnnnnnnnnnnnnnnnnnnnnnnnnnnnnnnnnnnnnnnnnnnnnnnnnnnnnnnnnnnnnnnnnnnnnnnnnnnnnnnnnnnnnnnnnnnnnnnnnnnnnnnnnnnnnnnnnnnnnnnnnnnnnnnnnnnnnnnnnnnnnnnnnnnnnnnnnnnnnnnnnnnnnnnnnnnnnnnnnnnnnnnnnnnnnnnnnnnnnnnnnnnnnnnnnnnnnnnnnnnnnnnnnnnnnnnnnnnnnnnnnnnnnnnnnnnnnnnnnnnnnnnnnnnnnnnnnnnnnnnnnnnnnnnnnnnnnnnnnnnnnnnnnnnnnnnnnnnnnnnnnnnnnnnnnnnnnnnnnnnnnnnnnnnnnnnnnnnnnnnnnnnnnnnnnnnnnnnnnnnnnnnnnnnnnnnnnnnnnnnnnnnnnnnnnnnnnnnnnnnnnnnnnnnnnnnnnnnnnnnnnnnnnnnnnnnnnnnnnnnnnnnnnnnnnnnnnnnnnnnnnnnnnnnnnnnnnnnnnnnnnnnnnnnnnnnnnnnnnnnnnnnnnnnnnnnnnnnnnnnnnnnnnnnnnnnnnnnnnnnnnnnnnnnnnnnnnnnnnnnnnnnnnnnnnnnnnnnnnnnnnnnnnnnnnnnnnnnnnnnnnnnnnnnnnnnnnnnnnnnnnnnnnnnnnnnnnnnnnnnnnnnnnnnnnnnnnnnnnnnnnnnnnnnnnnnnnnnnnnnnnnnnnnnnnnnnnnnnnnnnnnnnnnnnnnnnnnnnnnnnnnnnnnnnnnnnnnnnnnnnnnnnnnnnnnnnnnnnnnnnnnnnnnnnnnnnnnnnnnnnnnnnnnnnnnnnnnnnnnnnnnnnnnnnnnnnnnnnnnnnnnnnnnnnnnnnnnnnnnnnnnnnnnnnnnnnnnnnnnnnnnnnnnnnnnnnnnnnnnnnnnnnnnnnnnnnnnnnnnnnnnnnnnnnnnnnnnnnnnnnnnnnnnnnnnnnnnnnnnnnnnnnnnnnnnnnnnnnnnnnnnnnnnnnnnnnnnnnnnnnnnnnnnnnnnnnnnnnnnnnnnnnnnnnnnnnnnnnnnnnnnnnnnnnnnnnnnnnnnnnnnnnnnnnnnnnnnnnnnnnnnnnnnnnnnnnnnnnnnnnnnnnnnnnnnnnnnnnnnnnnnnnnnnnnnnnnnnnnnnnnnnnnnnnnnnnnnnnnnnnnnnnnnnnnnnnnnnnnnnnnnnnnnnnnnnnnnnnnnnnnnnnnnnnnnnnnnnnnnnnnnnnnnnnnnnnnnnnnnnnnnnnnnnnnnnnnnnnnnnnnnnnnnnnnnnnnnnnnnnnnnnnnnnnnnnnnnnnnnnnnnnnnnnnnnnnnnnnnnnnnnnnnnnnnnnnnnnnnnnnnnnnnnnnnnnnnnnnnnnnnnnnnnnnnnnnnnnnnnnnnnnnnnnnnnnnnnnnnnnnnnnnnnnnnnnnnnnnnnnnnnnnnnnnnnnnnnnnnnnnnnnnnnnnnnnnnnnnnnnnnnnnnnnnnnnnnnnnnnnnnnnnnnnnnnnnnnnnnnnnnnnnnnnnnnnnnnnnnnnnnnnnnnnnnnnnnnnnnnnnnnnnnnnnnnnnnnnnnnnnnnnnnnnnnnnnnnnnnnnnnnnnnnnnnnnnnnnnnnnnnnnnnnnnnnnnnnnnnnnnnnnnnnnnnnnnnnnnnnnnnnnnnnnnnnnnnnnnnnnnnnnnnnnnnnnnnnnnnnnnnnnnnnnnnnnnnnnnnnnnnnnnnnnnnnnnnnnnnnnnnnnnnnnnnnnnnnnnnnnnnnnnnnnnnnnnnnnnnnnnnnnnnnnnnnnnnnnnnnnnnnnnnnnnnnnnnnnnnnnnnnnnnnnnnnnnnnnnnnnnnnnnnnnnnnnnnnnnnnnnnnnnnnnnnnnnnnnnnnnnnnnnnnnnnnnnnnnnnnnnnnnnnnnnnnnnnnnnnnnnnnnnnnnnnnnnnnnnnnnnnnnnnnnnnnnnnnnnnnnnnnnnnnnnnnnnnnnnnnnnnnnnnnnnnnnnnnnnnnnnnnnnnnnnnnnnnnnnnnnnnnnnnnnnnnnnnnnnnnnnnnnnnnnnnnnnnnnnnnnnnnnnnnnnnnnnnnnnnnnnnnnnnnnnnnnnnnnnnnnnnnnnnnnnnnnnnnnnnnnnnnnnnnnnnnnnnnnnnnnnnnnnnnnnnnnnnnnnnnnnnnnnnnnnnnnnnnnnnnnnnnnnnnnnnnnnnnnnnnnnnnnnnnnnnnnnnnnnnnnnnnnnnnnnnnnnnnnnnnnnnnnnnnnnnnnnnnnnnnnnnnnnnnnnnnnnnnnnnnnnnnnnnnnnnnnnnnnnnnnnnnnnnnnnnnnnnnnnnnnnnnnnnnnnnnnnnnnnnnnnnnnnnnnnnnnnnnnnnnnnnnnnnnnnnnnnnnnnnnnnnnnnnnnnnnnnnnnnnnnnnnnnnnnnnnnnnnnnnnnnnnnnnnnnnnnnnnnnnnnnnnnnnnnnnnnnnnnnnnnnnnnnnnnnnnnnnnnnnnnnnnnnnnnnnnnnnnnnnnnnnnnnnnnnnnnnnnnnnnnnnnnnnnnnnnnnnnnnnnnnnnnnnnnnnnnnnnnnnnnnnnnnnnnnnnnnnnnnnnnnnnnnnnnnnnnnnnnnnnnnnnnnnnnnnnnnnnnnnnnnnnnnnnnnnnnnnnnnnnnnnnnnnnnnnnnnnnnnnnnnnnnnnnnnnnnnnnnnnnnnnnnnnnnnnnnnnnnnnnnnnnnnnnnnnnnnnnnnnnnnnnnnnnnnnnnnnnnnnnnnnnnnnnnnnnnnnnnnnnnnnnnnnnnnnnnnnnnnnnnnnnnnnnnnnnnnnnnnnnnnnnnnnnnnnnnnnnnnnnnnnnnnnnnnnnnnnnnnnnnnnnnnnnnnnnnnnnnnnnnnnnnnnnnnnnnnnnnnnnnnnnnnnnnnnnnnnnnnnnnnnnnnnnnnnnnnnnnnnnnnnnnnnnnnnnnnnnnnnnnnnnnnnnnnnnnnnnnnnnnnnnnnnnnnnnnnnnnnnnnnnnnnnnnnnnnnnnnnnnnnnnnnnnnnnnnnnnnnnnnnnnnnnnnnnnnnnnnnnnnnnnnnnnnnnnnnnnnnnnnnnnnnnnnnnnnnnnnnnnnnnnnnnnnnnnnnnnnnnnnnnnnnnnnnnnnnnnnnnnnnnnnnnnnnnnnnnnnnnnnnnnnnnnnnnnnnnnnnnnnnnnnnnnnnnnnnnnnnnnnnnnnnnnnnnnnnnnnnnnnnnnnnnnnnnnnnnnnnnnnnnnnnnnnnnnnnnnnnnnnnnnnnnnnnnnnnnnnnnnnnnnnnnnnnnnnnnnnnnnnnnnnnnnnnnnnnnnnnnnnnnnnnnnnnnnnnnnnnnnnnnnnnnnnnnnnnnnnnnnnnnnnnnnnnnnnnnnnnnnnnnnnnnnnnnnnnnnnnnnnnnnnnnnnnnnnnnnnnnnnnnnnnnnnnnnnnnnnnnnnnnnnnnnnnnnnnnnnnnnnnnnnnnnnnnnnnnnnnnnnnnnnnnnnnnnnnnnnnnnnnnnnnnnnnnnnnnnnnnnnnnnnnnnnnnnnnnnnnnnnnnnnnnnnnnnnnnnnnnnnnnnnnnnnnnnnnnnnnnnnnnnnnnnnnnnnnnnnnnnnnnnnnnnnnnnnnnnnnnnnnnnnnnnnnnnnnnnnnnnnnnnnnnnnnnnnnnnnnnnnnnnnnnnnnnnnnnnnnnnnnnnnnnnnnnnnnnnnnnnnnnnnnnnnnnnnnnnnnnnnnnnnnnnnnnnnnnnnnnnnnnnnnnnnnnnnnnnnnnnnnnnnnnnnnnnnnnnnnnnnnnnnnnnnnnnnnnnnnnnnnnnnnnnnnnnnnnnnnnnnnnnnnnnnnnnnnnnnnnnnnnnnnnnnnnnnnnnnnnnnnnnnnnnnnnnnnnnnnnnnnnnnnnnnnnnnnnnnnnnnnnnnnnnnnnnnnnnnnnnnnnnnnnnnnnnnnnnnnnnnnnnnnnnnnnnnnnnnnnnnnnnnnnnnnnnnnnnnnnnnnnnnnnnnnnnnnnnnnnnnnnnnnnnnnnnnnnnnnnnnnnnnnnnnnnnnnnnnnnnnnnnnnnnnnnnnnnnnnnnnnnnnnnnnnnnnnnnnnnnnnnnnnnnnnnnnnnnnnnnnnnnnnnnnnnnnnnnnnnnnnnnnnnnnnnnnnnnnnnnnnnnnnnnnnnnnnnnnnnnnnnnnnnnnnnnnnnnnnnnnnnnnnnnnnnnnnnnnnnnnnnnnnnnnnnnnnnnnnnnnnnnnnnnnnnnnnnnnnnnnnnnnnnnnnnnnnnnnnnnnnnnnnnnnnnnnnnnnnnnnnnnnnnnnnnnnnnnnnnnnnnnnnnnnnnnnnnnnnnnnnnnnnnnnnnnnnnnnnnnnnnnnnnnnnnnnnnnnnnnnnnnnnnnnnnnnnnnnnnnnnnnnnnnnnnnnnnnnnnnnnnnnnnnnnnnnnnnnnnnnnnnnnnnnnnnnnnnnnnnnnnnnnnnnnnnnnnnnnnnnnnnnnnnnnnnnnnnnnnnnnnnnnnnnnnnnnnnnnnnnnnnnnnnnnnnnnnnnnnnnnnnnnnnnnnnnnnnnnnnnnnnnnnnnnnnnnnnnnnnnnnnnnnnnnnnnnnnnnnnnnnnnnnnnnnnnnnnnnnnnnnnnnnnnnnnnnnnnnnnnnnnnnnnnnnnnnnnnnnnnnnnnnnnnnnnnnnnnnnnnnnnnnnnnnnnnnnnnnnnnnnnnnnnnnnnnnnnnnnnnnnnnnnnnnnnnnnnnnnnnnnnnnnnnnnnnnnnnnnnnnnnnnnnnnnnnnnnnnnnnnnnnnnnnnnnnnnnnnnnnnnnnnnnnnnnnnnnnnnnnnnnnnnnnnnnnnnnnnnnnnnnnnnnnnnnnnnnnnnnnnnnnnnnnnnnnnnnnnnnnnnnnnnnnnnnnnnnnnnnnnnnnnnnnnnnnnnnnnnnnnnnnnnnnnnnnnnnnnnnnnnnnnnnnnnnnnnnnnnnnnnnnnnnnnnnnnnnnnnnnnnnnnnnnnnnnnnnnnnnnnnnnnnnnnnnnnnnnnnnnnnnnnnnnnnnnnnnnnnnnnnnnnnnnnnnnnnnnnnnnnnnnnnnnnnnnnnnnnnnnnnnnnnnnnnnnnnnnnnnnnnnnnnnnnnnnnnnnnnnnnnnnnnnnnnnnnnnnnnnnnnnnnnnnnnnnnnnnnnnnnnnnnnnnnnnnnnnnnnnnnnnnnnnnnnnnnnnnnnnnnnnnnnnnnnnnnnnnnnnnnnnnnnnnnnnnnnnnnnnnnnnnnnnnnnnnnnnnnnnnnnnnnnnnnnnnnnnnnnnnnnnnnnnnnnnnnnnnnnnnnnnnnnnnnnnnnnnnnnnnnnnnnnnnnnnnnnnnnnnnnnnnnnnnnnnnnnnnnnnnnnnnnnnnnnnnnnnnnnnnnnnnnnnnnnnnnnnnnnnnnnnnnnnnnnnnnnnnnnnnnnnnnnnnnnnnnnnnnnnnnnnnnnnnnnnnnnnnnnnnnnnnnnnnnnnnnnnnnnnnnnnnnnnnnnnnnnnnnnnnnnnnnnnnnnnnnnnnnnnnnnnnnnnnnnnnnnnnnnnnnnnnnnnnnnnnnnnnnnnnnnnnnnnnnnnnnnnnnnnnnnnnnnnnnnnnnnnnnnnnnnnnnnnnnnnnnnnnnnnnnnnnnnnnnnnnnnnnnnnnnnnnnnnnnnnnnnnnnnnnnnnnnnnnnnnnnnnnnnnnnnnnnnnnnnnnnnnnnnnnnnnnnnnnnnnnnnnnnnnnnnnnnnnnnnnnnnnnnnnnnnnnnnnnnnnnnnnnnnnnnnnnnnnnnnnnnnnnnnnnnnnnnnnnnnnnnnnnnnnnnnnnnnnnnnnnnnnnnnnnnnnnnnnnnnnnnnnnnnnnnnnnnnnnnnnnnnnnnnnnnnnnnnnnnnnnnnnnnnnnnnnnnnnnnnnnnnnnnnnnnnnnnnnnnnnnnnnnnnnnnnnnnnnnnnnnnnnnnnnnnnnnnnnnnnnnnnnnnnnnnnnnnnnnnnnnnnnnnnnnnnnnnnnnnnnnnnnnnnnnnnnnnnnnnnnnnnnnnnnnnnnnnnnnnnnnnnnnnnnnnnnnnnnnnnnnnnnnnnnnnnnnnnnnnnnnnnnnnnnnnnnnnnnnnnnnnnnnnnnnnnnnnnnnnnnnnnnnnnnnnnnnnnnnnnnnnnnnnnnnnnnnnnnnnnnnnnnnnnnnnnnnnnnnnnnnnnnnnnnnnnnnnnnnnnnnnnnnnnnnnnnnnnnnnnnnnnnnnnnnnnnnnnnnnnnnnnnnnnnnnnnnnnnnnnnnnnnnnnnnnnnnnnnnnnnnnnnnnnnnnnnnnnnnnnnnnnnnnnnnnnnnnnnnnnnnnnnnnnnnnnnnnnnnnnnnnnnnnnnnnnnnnnnnnnnnnnnnnnnnnnnnnnnnnnnnnnnnnnnnnnnnnnnnnnnnnnnnnnnnnnnnnnnnnnnnnnnnnnnnnnnnnnnnnnnnnnnnnnnnnnnnnnnnnnnnnnnnnnnnnnnnnnnnnnnnnnnnnnnnnnnnnnnnnnnnnnnnnnnnnnnnnnnnnnnnnnnnnnnnnnnnnnnnnnnnnnnnnnnnnnnnnnnnnnnnnnnnnnnnnnnnnnnnnnnnnnnnnnnnnnnnnnnnnnnnnnnnnnnnnnnnnnnnnnnnnnnnnnnnnnnnnnnnnnnnnnnnnnnnnnnnnnnnnnnnnnnnnnnnnnnnnnnnnnnnnnnnnnnnnnnnnnnnnnnnnnnnnnnnnnnnnnnnnnnnnnnnnnnnnnnnnnnnnnnnnnnnnnnnnnnnnnnnnnnnnnnnnnnnnnnnnnnnnnnnnnnnnnnnnnnnnnnnnnnnnnnnnnnnnnnnnnnnnnnnnnnnnnnnnnnnnnnnnnnnnnnnnnnnnnnnnnnnnnnnnnnnnnnnnnnnnnnnnnnnnnnnnnnnnnnnnnnnnnnnnnnnnnnnnnnnnnnnnnnnnnnnnnnnnnnnnnnnnnnnnnnnnnnnnnnnnnnnnnnnnnnnnnnnnnnnnnnnnnnnnnnnnnnnnnnnnnnnnnnnnnnnnnnnnnnnnnnnnnnnnnnnnnnnnnnnnnnnnnnnnnnnnnnnnnnnnnnnnnnnnnnnnnnnnnnnnnnnnnnnnnnnnnnnnnnnnnnnnnnnnnnnnnnnnnnnnnnnnnnnnnnnnnnnnnnnnnnnnnnnnnnnnnnnnnnnnnnnnnnnnnnnnnnnnnnnnnnnnnnnnnnnnnnnnnnnnnnnnnnnnnnnnnnnnnnnnnnnnnnnnnnnnnnnnnnnnnnnnnnnnnnnnnnnnnnnnnnnnnnnnnnnnnnnnnnnnnnnnnnnnnnnnnnnnnnnnnnnnnnnnnnnnnnnnnnnnnnnnnnnnnnnnnnnnnnnnnnnnnnnnnnnnnnnnnnnnnnnnnnnnnnnnnnnnnnnnnnnnnnnnnnnnnnnnnnnnnnnnnnnnnnnnnnnnnnnnnnnnnnnnnnnnnnnnnnnnnnnnnnnnnnnnnnnnnnnnnnnnnnnnnnnnnnnnnnnnnnnnnnnnnnnnnnnnnnnnnnnnnnnnnnnnnnnnnnnnnnnnnnnnnnnnnnnnnnnnnnnnnnnnnnnnnnnnnnnnnnnnnnnnnnnnnnnnnnnnnnnnnnnnnnnnnnnnnnnnnnnnnnnnnnnnnnnnnnnnnnnnnnnnnnnnnnnnnnnnnnnnnnnnnnnnnnnnnnnnnnnnnnnnnnnnnnnnnnnnnnnnnnnnnnnnnnnnnnnnnnnnnnnnnnnnnnnnnnnnnnnnnnnnnnnnnnnnnnnnnnnnnnnnnnnnnnnnnnnnnnnnnnnnnnnnnnnnnnnnnnnnnnnnnnnnnnnnnnnnnnnnnnnnnnnnnnnnnnnnnnnnnnnnnnnnnnnnnnnnnnnnnnnnnnnnnnnnnnnnnnnnnnnnnnnnnnnnnnnnnnnnnnnnnnnnnnnnnnnnnnnnnnnnnnnnnnnnnnnnnnnnnnnnnnnnnnnnnnnnnnnnnnnnnnnnnnnnnnnnnnnnnnnnnnnnnnnnnnnnnnnnnnnnnnnnnnnnnnnnnnnnnnnnnnnnnnnnnnnnnnnnnnnnnnnnnnnnnnnnnnnnnnnnnnnnnnnnnnnnnnnnnnnnnnnnnnnnnnnnnnnnnnnnnnnnnnnnnnnnnnnnnnnnnnnnnnnnnnnnnnnnnnnnnnnnnnnnnnnnnnnnnnnnnnnnnnnnnnnnnnnnnnnnnnnnnnnnnnnnnnnnnnnnnnnnnnnnnnnnnnnnnnnnnnnnnnnnnnnnnnnnnnnnnnnnnnnnnnnnnnnnnnnnnnnnnnnnnnnnnnnnnnnnnnnnnnnnnnnnnnnnnnnnnnnnnnnnnnnnnnnnnnnnnnnnnnnnnnnnnnnnnnnnnnnnnnnnnnnnnnnnnnnnnnnnnnnnnnnnnnnnnnnnnnnnnnnnnnnnnnnnnnnnnnnnnnnnnnnnnnnnnnnnnnnnnnnnnnnnnnnnnnnnnnnnnnnnnnnnnnnnnnnnnnnnnnnnnnnnnnnnnnnnnnnnnnnnnnnnnnnnnnnnnnnnnnnnnnnnnnnnnnnnnnnnnnnnnnnnnnnnnnnnnnnnnnnnnnnnnnnnnnnnnnnnnnnnnnnnnnnnnnnnnnnnnnnnnnnnnnnnnnnnnnnnnnnnnnnnnnnnnnnnnnnnnnnnnnnnnnnnnnnnnnnnnnnnnnnnnnnnnnnnnnnnnnnnnnnnnnnnnnnnnnnnnnnnnnnnnnnnnnnnnnnnnnnnnnnnnnnnnnnnnnnnnnnnnnnnnnnnnnnnnnnnnnnnnnnnnnnnnnnnnnnnnnnnnnnnnnnnnnnnnnnnnnnnnnnnnnnnnnnnnnnnnnnnnnnnnnnnnnnnnnnnnnnnnnnnnnnnnnnnnnnnnnnnnnnnnnnnnnnnnnnnnnnnnnnnnnnnnnnnnnnnnnnnnnnnnnnnnnnnnnnnnnnnnnnnnnnnnnnnnnnnnnnnnnnnnnnnnnnnnnnnnnnnnnnnnnnnnnnnnnnnnnnnnnnnnnnnnnnnnnnnnnnnnnnnnnnnnnnnnnnnnnnnnnnnnnnnnnnnnnnnnnnnnnnnnnnnnnnnnnnnnnnnnnnnnnnnnnnnnnnnnnnnnnnnnnnnnnnnnnnnnnnnnnnnnnnnnnnnnnnnnnnnnnnnnnnnnnnnnnnnnnnnnnnnnnnnnnnnnnnnnnnnnnnnnnnnnnnnnnnnnnnnnnnnnnnnnnnnnnnnnnnnnnnnnnnnnnnnnnnnnnnnnnnnnnnnnnnnnnnnnnnnnnnnnnnnnnnnnnnnnnnnnnnnnnnnnnnnnnnnnnnnnnnnnnnnnnnnnnnnnnnnnnnnnnnnnnnnnnnnnnnnnnnnnnnnnnnnnnnnnnnnnnnnnnnnnnnnnnnnnnnnnnnnnnnnnnnnnnnnnnnnnnnnnnnnnnnnnnnnnnnnnnnnnnnnnnnnnnnnnnnnnnnnnnnnnnnnnnnnnnnnnnnnnnnnnnnnnnnnnnnnnnnnnnnnnnnnnnnnnnnnnnnnnnnnnnnnnnnnnnnnnnnnnnnnnnnnnnnnnnnnnnnnnnnnnnnnnnnnnnnnnnnnnnnnnnnnnnnnnnnnnnnnnnnnnnnnnnnnnnnnnnnnnnnnnnnnnnnnnnnnnnnnnnnnnnnnnnnnnnnnnnnnnnnnnnnnnnnnnnnnnnnnnnnnnnnnnnnnnnnnnnnnnnnnnnnnnnnnnnnnnnnnnnnnnnnnnnnnnnnnnnnnnnnnnnnnnnnnnnnnnnnnnnnnnnnnnnnnnnnnnnnnnnnnnnnnnnnnnnnnnnnnnnnnnnnnnnnnnnnnnnnnnnnnnnnnnnnnnnnnnnnnnnnnnnnnnnnnnnnnnnnnnnnnnnnnnnnnnnnnnnnnnnnnnnnnnnnnnnnnnnnnnnnnnnnnnnnnnnnnnnnnnnnnnnnnnnnnnnnnnnnnnnnnnnnnnnnnnnnnnnnnnnnnnnnnnnnnnnnnnnnnnnnnnnnnnnnnnnnnnnnnnnnnnnnnnnnnnnnnnnnnnnnnnnnnnnnnnnnnnnnnnnnnnnnnnnnnnnnnnnnnnnnnnnnnnnnnnnnnnnnnnnnnnnnnnnnnnnnnnnnnnnnnnnnnnnnnnnnnnnnnnnnnnnnnnnnnnnnnnnnnnnnnnnnnnnnnnnnnnnnnnnnnnnnnnnnnnnnnnnnnnnnnnnnnnnnnnnnnnnnnnnnnnnnnnnnnnnnnnnnnnnnnnnnnnnnnnnnnnnnnnnnnnnnnnnnnnnnnnnnnnnnnnnnnnnnnnnnnnnnnnnnnnnnnnnnnnnnnnnnnnnnnnnnnnnnnnnnnnnnnnnnnnnnnnnnnnnnnnnnnnnnnnnnnnnnnnnnnnnnnnnnnnnnnnnnnnnnnnnnnnnnnnnnnnnnnnnnnnnnnnnnnnnnnnnnnnnnnnnnnnnnnnnnnnnnnnnnnnnnnnnnnnnnnnnnnnnnnnnnnnnnnnnnnnnnnnnnnnnnnnnnnnnnnnnnnnnnnnnnnnnnnnnnnnnnnnnnnnnnnnnnnnnnnnnnnnnnnnnnnnnnnnnnnnnnnnnnnnnnnnnnnnnnnnnnnnnnnnnnnnnnnnnnnnnnnnnnnnnnnnnnnnnnnnnnnnnnnnnnnnnnnnnnnnnnnnnnnnnnnnnnnnnnnnnnnnnnnnnnnnnnnnnnnnnnnnnnnnnnnnnnnnnnnnnnnnnnnnnnnnnnnnnnnnnnnnnnnnnnnnnnnnnnnnnnnnnnnnnnnnnnnnnnnnnnnnnnnnnnnnnnnnnnnnnnnnnnnnnnnnnnnnnnnnnnnnnnnnnnnnnnnnnnnnnnnnnnnnnnnnnnnnnnnnnnnnnnnnnnnnnnnnnnnnnnnnnnnnnnnnnnnnnnnnnnnnnnnnnnnnnnnnnnnnnnnnnnnnnnnnnnnnnnnnnnnnnnnnnnnnnnnnnnnnnnnnnnnnnnnnnnnnnnnnnnnnnnnnnnnnnnnnnnnnnnnnnnnnnnnnnnnnnnnnnnnnnnnnnnnnnnnnnnnnnnnnnnnnnnnnnnnnnnnnnnnnnnnnnnnnnnnnnnnnnnnnnnnnnnnnnnnnnnnnnnnnnnnnnnnnnnnnnnnnnnnnnnnnnnnnnnnnnnnnnnnnnnnnnnnnnnnnnnnnnnnnnnnnnnnnnnnnnnnnnnnnnnnnnnnnnnnnnnnnnnnnnnnnnnnnnnnnnnnnnnnnnnnnnnnnnnnnnnnnnnnnnnnnnnnnnnnnnnnnnnnnnnnnnnnnnnnnnnnnnnnnnnnnnnnnnnnnnnnnnnnnnnnnnnnnnnnnnnnnnnnnnnnnnnnnnnnnnnnnnnnnnnnnnnnnnnnnnnnnnnnnnnnnnnnnnnnnnnnnnnnnnnnnnnnnnnnnnnnnnnnnnnnnnnnnnnnnnnnnnnnnnnnnnnnnnnnnnnnnnnnnnnnnnnnnnnnnnnnnnnnnnnnnnnnnnnnnnnnnnnnnnnnnnnnnnnnnnnnnnnnnnnnnnnnnnnnnnnnnnnnnnnnnnnnnnnnnnnnnnnnnnnnnnnnnnnnnnnnnnnnnnnnnnnnnnnnnnnnnnnnnnnnnnnnnnnnnnnnnnnnnnnnnnnnnnnnnnnnnnnnnnnnnnnnnnnnnnnnnnnnnnnnnnnnnnnnnnnnnnnnnnnnnnnnnnnnnnnnnnnnnnnnnnnnnnnnnnnnnnnnnnnnnnnnnnnnnnnnnnnnnnnnnnnnnnnnnnnnnnnnnnnnnnnnnnnnnnnnnnnnnnnnnnnnnnnnnnnnnnnnnnnnnnnnnnnnnnnnnnnnnnnnnnnnnnnnnnnnnnnnnnnnnnnnnnnnnnnnnnnnnnnnnnnnnnnnnnnnnnnnnnnnnnnnnnnnnnnnnnnnnnnnnnnnnnnnnnnnnnnnnnnnnnnnnnnnnnnnnnnnnnnnnnnnnnnnnnnnnnnnnnnnnnnnnnnnnnnnnnnnnnnnnnnnnnnnnnnnnnnnnnnnnnnnnnnnnnnnnnnnnnnnnnnnnnnnnnnnnnnnnnnnnnnnnnnnnnnnnnnnnnnnnnnnnnnnnnnnnnnnnnnnnnnnnnnnnnnnnnnnnnnnnnnnnnnnnnnnnnnnnnnnnnnnnnnnnnnnnnnnnnnnnnnnnnnnnnnnnnnnnnnnnnnnnnnnnnnnnnnnnnnnnnnnnnnnnnnnnnnnnnnnnnnnnnnnnnnnnnnnnnnnnnnnnnnnnnnnnnnnnnnnnnnnnnnnnnnnnnnnnnnnnnnnnnnnnnnnnnnnnnnnnnnnnnnnnnnnnnnnnnnnnnnnnnnnnnnnnnnnnnnnnnnnnnnnnnnnnnnnnnnnnnnnnnnnnnnnnnnnnnnnnnnnnnnnnnnnnnnnnnnnnnnnnnnnnnnnnnnnnnnnnnnnnnnnnnnnnnnnnnnnnnnnnnnnnnnnnnnnnnnnnnnnnnnnnnnnnnnnnnnnnnnnnnnnnnnnnnnnnnnnnnnnnnnnnnnnnnnnnnnnnnnnnnnnnnnnnnnnnnnnnnnnnnnnnnnnnnnnnnnnnnnnnnnnnnnnnnnnnnnnnnnnnnnnnnnnnnnnnnnnnnnnnnnnnnnnnnnnnnnnnnnnnnnnnnnnnnnnnnnnnnnnnnnnnnnnnnnnnnnnnnnnnnnnnnnnnnnnnnnnnnnnnnnnnnnnnnnnnnnnnnnnnnnnnnnnnnnnnnnnnnnnnnnnnnnnnnnnnnnnnnnnnnnnnnnnnnnnnnnnnnnnnnnnnnnnnnnnnnnnnnnnnnnnnnnnnnnnnnnnnnnnnnnnnnnnnnnnnnnnnnnnnnnnnnnnnnnnnnnnnnnnnnnnnnnnnnnnnnnnnnnnnnnnnnnnnnnnnnnnnnnnnnnnnnnnnnnnnnnnnnnnnnnnnnnnnnnnnnnnnnnnnnnnnnnnnnnnnnnnnnnnnnnnnnnnnnnnnnnnnnnnnnnnnnnnnnnnnnnnnnnnnnnnnnnnnnnnnnnnnnnnnnnnnnnnnnnnnnnnnnnnnnnnnnnnnnnnnnnnnnnnnnnnnnnnnnnnnnnnnnnnnnnnnnnnnnnnnnnnnnnnnnnnnnnnnnnnnnnnnnnnnnnnnnnnnnnnnnnnnnnnnnnnnnnnnnnnnnnnnnnnnnnnnnnnnnnnnnnnnnnnnnnnnnnnnnnnnnnnnnnnnnnnnnnnnnnnnnnnnnnnnnnnnnnnnnnnnnnnnnnnnnnnnnnnnnnnnnnnnnnnnnnnnnnnnnnnnnnnnnnnnnnnnnnnnnnnnnnnnnnnnnnnnnnnnnnnnnnnnnnnnnnnnnnnnnnnnnnnnnnnnnnnnnnnnnnnnnnnnnnnnnnnnnnnnnnnnnnnnnnnnnnnnnnnnnnnnnnnnnnnnnnnnnnnnnnnnnnnnnnnnnnnnnnnnnnnnnnnnnnnnnnnnnnnnnnnnnnnnnnnnnnnnnnnnnnnnnnnnnnnnnnnnnnnnnnnnnnnnnnnnnnnnnnnnnnnnnnnnnnnnnnnnnnnnnnnnnnnnnnnnnnnnnnnnnnnnnnnnnnnnnnnnnnnnnnnnnnnnnnnnnnnnnnnnnnnnnnnnnnnnnnnnnnnnnnnnnnnnnnnnnnnnnnnnnnnnnnnnnnnnnnnnnnnnnnnnnnnnnnnnnnnnnnnnnnnnnnnnnnnnnnnnnnnnnnnnnnnnnnnnnnnnnnnnnnnnnnnnnnnnnnnnnnnnnnnnnnnnnnnnnnnnnnnnnnnnnnnnnnnnnnnnnnnnnnnnnnnnnnnnnnnnnnnnnnnnnnnnnnnnnnnnnnnnnnnnnnnnnnnnnnnnnnnnnnnnnnnnnnnnnnnnnnnnnnnnnnnnnnnnnnnnnnnnnnnnnnnnnnnnnnnnnnnnnnnnnnnnnnnnnnnnnnnnnnnnnnnnnnnnnnnnnnnnnnnnnnnnnnnnnnnnnnnnnnnnnnnnnnnnnnnnnnnnnnnnnnnnnnnnnnnnnnnnnnnnnnnnnnnnnnnnnnnnnnnnnnnnnnnnnnnnnnnnnnnnnnnnnnnnnnnnnnnnnnnnnnnnnnnnnnnnnnnnnnnnnnnnnnnnnnnnnnnnnnnnnnnnnnnnnnnnnnnnnnnnnnnnnnnnnnnnnnnnnnnnnnnnnnnnnnnnnnnnnnnnnnnnnnnnnnnnnnnnnnnnnnnnnnnnnnnnnnnnnnnnnnnnnnnnnnnnnnnnnnnnnnnnnnnnnnnnnnnnnnnnnnnnnnnnnnnnnnnnnnnnnnnnnnnnnnnnnnnnnnnnnnnnnnnnnnnnnnnnnnnnnnnnnnnnnnnnnnnnnnnnnnnnnnnnnnnnnnnnnnnnnnnnnnnnnnnnnnnnnnnnnnnnnnnnnnnnnnnnnnnnnnnnnnnnnnnnnnnnnnnnnnnnnnnnnnnnnnnnnnnnnnnnnnnnnnnnnnnnnnnnnnnnnnnnnnnnnnnnnnnnnnnnnnnnnnnnnnnnnnnnnnnnnnnnnnnnnnnnnnnnnnnnnnnnnnnnnnnnnnnnnnnnnnnnnnnnnnnnnnnnnnnnnnnnnnnnnnnnnnnnnnnnnnnnnnnnnnnnnnnnnnnnnnnnnnnnnnnnnnnnnnnnnnnnnnnnnnnnnnnnnnnnnnnnnnnnnnnnnnnnnnnnnnnnnnnnnnnnnnnnnnnnnnnnnnnnnnnnnnnnnnnnnnnnnnnnnnnnnnnnnnnnnnnnnnnnnnnnnnnnnnnnnnnnnnnnnnnnnnnnnnnnnnnnnnnnnnnnnnnnnnnnnnnnnnnnnnnnnnnnnnnnnnnnnnnnnnnnnnnnnnnnnnnnnnnnnnnnnnnnnnnnnnnnnnnnnnnnnnnnnnnnnnnnnnnnnnnnnnnnnnnnnnnnnnnnnnnnnnnnnnnnnnnnnnnnnnnnnnnnnnnnnnnnnnnnnnnnnnnnnnnnnnnnnnnnnnnnnnnnnnnnnnnnnnnnnnnnnnnnnnnnnnnnnnnnnnnnnnnnnnnnnnnnnnnnnnnnnnnnnnnnnnnnnnnnnnnnnnnnnnnnnnnnnnnnnnnnnnnnnnnnnnnnnnnnnnnnnnnnnnnnnnnnnnnnnnnnnnnnnnnnnnnnnnnnnnnnnnnnnnnnnnnnnnnnnnnnnnnnnnnnnnnnnnnnnnnnnnnnnnnnnnnnnnnnnnnnnnnnnnnnnnnnnnnnnnnnnnnnnnnnnnnnnnnnnnnnnnnnnnnnnnnnnnnnnnnnnnnnnnnnnnnnnnnnnnnnnnnnnnnnnnnnnnnnnnnnnnnnnnnnnnnnnnnnnnnnnnnnnnnnnnnnnnnnnnnnnnnnnnnnnnnnnnnnnnnnnnnnnnnnnnnnnnnnnnnnnnnnnnnnnnnnnnnnnnnnnnnnnnnnnnnnnnnnnnnnnnnnnnnnnnnnnnnnnnnnnnnnnnnnnnnnnnnnnnnnnnnnnnnnnnnnnnnnnnnnnnnnnnnnnnnnnnnnnnnnnnnnnnnnnnnnnnnnnnnnnnnnnnnnnnnnnnnnnnnnnnnnnnnnnnnnnnnnnnnnnnnnnnnnnnnnnnnnnnnnnnnnnnnnnnnnnnnnnnnnnnnnnnnnnnnnnnnnnnnnnnnnnnnnnnnnnnnnnnnnnnnnnnnnnnnnnnnnnnnnnnnnnnnnnnnnnnnnnnnnnnnnnnnnnnnnnnnnnnnnnnnnnnnnnnnnnnnnnnnnnnnnnnnnnnnnnnnnnnnnnnnnnnnnnnnnnnnnnnnnnnnnnnnnnnnnnnnnnnnnnnnnnnnnnnnnnnnnnnnnnnnnnnnnnnnnnnnnnnnnnnnnnnnnnnnnnnnnnnnnnnnnnnnnnnnnnnnnnnnnnnnnnnnnnnnnnnnnnnnnnnnnnnnnnnnnnnnnnnnnnnnnnnnnnnnnnnnnnnnnnnnnnnnnnnnnnnnnnnnnnnnnnnnnnnnnnnnnnnnnnnnnnnnnnnnnnnnnnnnnnnnnnnnnnnnnnnnnnnnnnnnnnnnnnnnnnnnnnnnnnnnnnnnnnnnnnnnnnnnnnnnnnnnnnnnnnnnnnnnnnnnnnnnnnnnnnnnnnnnnnnnnnnnnnnnnnnnnnnnnnnnnnnnnnnnnnnnnnnnnnnnnnnnnnnnnnnnnnnnnnnnnnnnnnnnnnnnnnnnnnnnnnnnnnnnnnnnnnnnnnnnnnnnnnnnnnnnnnnnnnnnnnnnnnnnnnnnnnnnnnnnnnnnnnnnnnnnnnnnnnnnnnnnnnnnnnnnnnnnnnnnnnnnnnnnnnnnnnnnnnnnnnnnnnnnnnnnnnnnnnnnnnnnnnnnnnnnnnnnnnnnnnnnnnnnnnnnnnnnnnnnnnnnnnnnnnnnnnnnnnnnnnnnnnnnnnnnnnnnnnnnnnnnnnnnnnnnnnnnnnnnnnnnnnnnnnnnnnnnnnnnnnnnnnnnnnnnnnnnnnnnnnnnnnnnnnnnnnnnnnnnnnnnnnnnnnnnnnnnnnnnnnnnnnnnnnnnnnnnnnnnnnnnnnnnnnnnnnnnnnnnnnnnnnnnnnnnnnnnnnnnnnnnnnnnnnnnnnnnnnnnnnnnnnnnnnnnnnnnnnnnnnnnnnnnnnnnnnnnnnnnnnnnnnnnnnnnnnnnnnnnnnnnnnnnnnnnnnnnnnnnnnnnnnnnnnnnnnnnnnnnnnnnnnnnnnnnnnnnnnnnnnnnnnnnnnnnnnnnnnnnnnnnnnnnnnnnnnnnnnnnnnnnnnnnnnnnnnnnnnnnnnnnnnnnnnnnnnnnnnnnnnnnnnnnnnnnnnnnnnnnnnnnnnnnnnnnnnnnnnnnnnnnnnnnnnnnnnnnnnnnnnnnnnnnnnnnnnnnnnnnnnnnnnnnnnnnnnnnnnnnnnnnnnnnnnnnnnnnnnnnnnnnnnnnnnnnnnnnnnnnnnnnnnnnnnnnnnnnnnnnnnnnnnnnnnnnnnnnnnnnnnnnnnnnnnnnnnnnnnnnnnnnnnnnnnnnnnnnnnnnnnnnnnnnnnnnnnnnnnnnnnnnnnnnnnnnnnnnnnnnnnnnnnnnnnnnnnnnnnnnnnnnnnnnnnnnnnnnnnnnnnnnnnnnnnnnnnnnnnnnnnnnnnnnnnnnnnnnnnnnnnnnnnnnnnnnnnnnnnnnnnnnnnnnnnnnnnnnnnnnnnnnnnnnnnnnnnnnnnnnnnnnnnnnnnnnnnnnnnnnnnnnnnnnnnnnnnnnnnnnnnnnnnnnnnnnnnnnnnnnnnnnnnnnnnnnnnnnnnnnnnnnnnnnnnnnnnnnnnnnnnnnnnnnnnnnnnnnnnnnnnnnnnnnnnnnnnnnnnnnnnnnnnnnnnnnnnnnnnnnnnnnnnnnnnnnnnnnnnnnnnnnnnnnnnnnnnnnnnnnnnnnnnnnnnnnnnnnnnnnnnnnnnnnnnnnnnnnnnnnnnnnnnnnnnnnnnnnnnnnnnnnnnnnnnnnnnnnnnnnnnnnnnnnnnnnnnnnnnnnnnnnnnnnnnnnnnnnnnnnnnnnnnnnnnnnnnnnnnnnnnnnnnnnnnnnnnnnnnnnnnnnnnnnnnnnnnnnnnnnnnnnnnnnnnnnnnnnnnnnnnnnnnnnnnnnnnnnnnnnnnnnnnnnnnnnnnnnnnnnnnnnnnnnnnnnnnnnnnnnnnnnnnnnnnnnnnnnnnnnnnnnnnnnnnnnnnnnnnnnnnnnnnnnnnnnnnnnnnnnnnnnnnnnnnnnnnnnnnnnnnnnnnnnnnnnnnnnnnnnnnnnnnnnnnnnnnnnnnnnnnnnnnnnnnnnnnnnnnnnnnnnnnnnnnnnnnnnnnnnnnnnnnnnnnnnnnnnnnnnnnnnnnnnnnnnnnnnnnnnnnnnnnnnnnnnnnnnnnnnnnnnnnnnnnnnnnnnnnnnnnnnnnnnnnnnnnnnnnnnnnnnnnnnnnnnnnnnnnnnnnnnnnnnnnnnnnnnnnnnnnnnnnnnnnnnnnnnnnnnnnnnnnnnnnnnnnnnnnnnnnnnnnnnnnnnnnnnnnnnnnnnnnnnnnnnnnnnnnnnnnnnnnnnnnnnnnnnnnnnnnnnnnnnnnnnnnnnnnnnnnnnnnnnnnnnnnnnnnnnnnnnnnnnnnnnnnnnnnnnnnnnnnnnnnnnnnnnnnnnnnnnnnnnnnnnnnnnnnnnnnnnnnnnnnnnnnnnnnnnnnnnnnnnnnnnnnnnnnnnnnnnnnnnnnnnnnnnnnnnnnnnnnnnnnnnnnnnnnnnnnnnnnnnnnnnnnnnnnnnnnnnnnnnnnnnnnnnnnnnnnnnnnnnnnnnnnnnnnnnnnnnnnnnnnnnnnnnnnnnnnnnnnnnnnnnnnnnnnnnnnnnnnnnnnnnnnnnnnnnnnnnnnnnnnnnnnnnnnnnnnnnnnnnnnnnnnnnnnnnnnnnnnnnnnnnnnnnnnnnnnnnnnnnnnnnnnnnnnnnnnnnnnnnnnnnnnnnnnnnnnnnnnnnnnnnnnnnnnnnnnnnnnnnnnnnnnnnnnnnnnnnnnnnnnnnnnnnnnnnnnnnnnnnnnnnnnnnnnnnnnnnnnnnnnnnnnnnnnnnnnnnnnnnnnnnnnnnnnnnnnnnnnnnnnnnnnnnnnnnnnnnnnnnnnnnnnnnnnnnnnnnnnnnnnnnnnnnnnnnnnnnnnnnnnnnnnnnnnnnnnnnnnnnnnnnnnnnnnnnnnnnnnnnnnnnnnnnnnnnnnnnnnnnnnnnnnnnnnnnnnnnnnnnnnnnnnnnnnnnnnnnnnnnnnnnnnnnnnnnnnnnnnnnnnnnnnnnnnnnnnnnnnnnnnnnnnnnnnnnnnnnnnnnnnnnnnnnnnnnnnnnnnnnnnnnnnnnnnnnnnnnnnnnnnnnnnnnnnnnnnnnnnnnnnnnnnnnnnnnnnnnnnnnnnnnnnnnnnnnnnnnnnnnnnnnnnnnnnnnnnnnnnnnnnnnnnnnnnnnnnnnnnnnnnnnnnnnnnnnnnnnnnnnnnnnnnnnnnnnnnnnnnnnnnnnnnnnnnnnnnnnnnnnnnnnnnnnnnnnnnnnnnnnnnnnnnnnnnnnnnnnnnnnnnnnnnnnnnnnnnnnnnnnnnnnnnnnnnnnnnnnnnnnnnnnnnnnnnnnnnnnnnnnnnnnnnnnnnnnnnnnnnnnnnnnnnnnnnnnnnnnnnnnnnnnnnnnnnnnnnnnnnnnnnnnnnnnnnnnnnnnnnnnnnnnnnnnnnnnnnnnnnnnnnnnnnnnnnnnnnnnnnnnnnnnnnnnnnnnnnnnnnnnnnnnnnnnnnnnnnnnnnnnnnnnnnnnnnnnnnnnnnnnnnnnnnnnnnnnnnnnnnnnnnnnnnnnnnnnnnnnnnnnnnnnnnnnnnnnnnnnnnnnnnnnnnnnnnnnnnnnnnnnnnnnnnnnnnnnnnnnnnnnnnnnnnnnnnnnnnnnnnnnnnnnnnnnnnnnnnnnnnnnnnnnnnnnnnnnnnnnnnnnnnnnnnnnnnnnnnnnnnnnnnnnnnnnnnnnnnnnnnnnnnnnnnnnnnnnnnnnnnnnnnnnnnnnnnnnnnnnnnnnnnnnnnnnnnnnnnnnnnnnnnnnnnnnnnnnnnnnnnnnnnnnnnnnnnnnnnnnnnnnnnnnnnnnnnnnnnnnnnnnnnnnnnnnnnnnnnnnnnnnnnnnnnnnnnnnnnnnnnnnnnnnnnnnnnnnnnnnnnnnnnnnnnnnnnnnnnnnnnnnnnnnnnnnnnnnnnnnnnnnnnnnnnnnnnnnnnnnnnnnnnnnnnnnnnnnnnnnnnnnnnnnnnnnnnnnnnnnnnnnnnnnnnnnnnnnnnnnnnnnnnnnnnnnnnnnnnnnnnnnnnnnnnnnnnnnnnnnnnnnnnnnnnnnnnnnnnnnnnnnnnnnnnnnnnnnnnnnnnnnnnnnnnnnnnnnnnnnnnnnnnnnnnnnnnnnnnnnnnnnnnnnnnnnnnnnnnnnnnnnnnnnnnnnnnnnnnnnnnnnnnnnnnnnnnnnnnnnnnnnnnnnnnnnnnnnnnnnnnnnnnnnnnnnnnnnnnnnnnnnnnnnnnnnnnnnnnnnnnnnnnnnnnnnnnnnnnnnnnnnnnnnnnnnnnnnnnnnnnnnnnnnnnnnnnnnnnnnnnnnnnnnnnnnnnnnnnnnnnnnnnnnnnnnnnnnnnnnnnnnnnnnnnnnnnnnnnnnnnnnnnnnnnnnnnnnnnnnnnnnnnnnnnnnnnnnnnnnnnnnnnnnnnnnnnnnnnnnnnnnnnnnnnnnnnnnnnnnnnnnnnnnnnnnnnnnnnnnnnnnnnnnnnnnnnnnnnnnnnnnnnnnnnnnnnnnnnnnnnnnnnnnnnnnnnnnnnnnnnnnnnnnnnnnnnnnnnnnnnnnnnnnnnnnnnnnnnnnnnnnnnnnnnnnnnnnnnnnnnnnnnnnnnnnnnnnnnnnnnnnnnnnnnnnnnnnnnnnnnnnnnnnnnnnnnnnnnnnnnnnnnnnnnnnnnnnnnnnnnnnnnnnnnnnnnnnnnnnnnnnnnnnnnnnnnnnnnnnnnnnnnnnnnnnnnnnnnnnnnnnnnnnnnnnnnnnnnnnnnnnnnnnnnnnnnnnnnnnnnnnnnnnnnnnnnnnnnnnnnnnnnnnnnnnnnnnnnnnnnnnnnnnnnnnnnnnnnnnnnnnnnnnnnnnnnnnnnnnnnnnnnnnnnnnnnnnnnnnnnnnnnnnnnnnnnnnnnnnnnnnnnnnnnnnnnnnnnnnnnnnnnnnnnnnnnnnnnnnnnnnnnnnnnnnnnnnnnnnnnnnnnnnnnnnnnnnnnnnnnnnnnnnnnnnnnnnnnnnnnnnnnnnnnnnnnnnnnnnnnnnnnnnnnnnnnnnnnnnnnnnnnnnnnnnnnnnnnnnnnnnnnnnnnnnnnnnnnnnnnnnnnnnnnnnnnnnnnnnnnnnnnnnnnnnnnnnnnnnnnnnnnnnnnnnnnnnnnnnnnnnnnnnnnnnnnnnnnnnnnnnnnnnnnnnnnnnnnnnnnnnnnnnnnnnnnnnnnnnnnnnnnnnnnnnnnnnnnnnnnnnnnnnnnnnnnnnnnnnnnnnnnnnnnnnnnnnnnnnnnnnnnnnnnnnnnnnnnnnnnnnnnnnnnnnnnnnnnnnnnnnnnnnnnnnnnnnnnnnnnnnnnnnnnnnnnnnnnnnnnnnnnnnnnnnnnnnnnnnnnnnnnnnnnnnnnnnnnnnnnnnnnnnnnnnnnnnnnnnnnnnnnnnnnnnnnnnnnnnnnnnnnnnnnnnnnnnnnnnnnnnnnnnnnnnnnnnnnnnnnnnnnnnnnnnnnnnnnnnnnnnnnnnnnnnnnnnnnnnnnnnnnnnnnnnnnnnnnnnnnnnnnnnnnnnnnnnnnnnnnnnnnnnnnnnnnnnnnnnnnnnnnnnnnnnnnnnnnnnnnnnnnnnnnnnnnnnnnnnnnnnnnnnnnnnnnnnnnnnnnnnnnnnnnnnnnnnnnnnnnnnnnnnnnnnnnnnnnnnnnnnnnnnnnnnnnnnnnnnnnnnnnnnnnnnnnnnnnnnnnnnnnnnnnnnnnnnnnnnnnnnnnnnnnnnnnnnnnnnnnnnnnnnnnnnnnnnnnnnnnnnnnnnnnnnnnnnnnnnnnnnnnnnnnnnnnnnnnnnnnnnnnnnnnnnnnnnnnnnnnnnnnnnnnnnnnnnnnnnnnnnnnnnnnnnnnnnnnnnnnnnnnnnnnnnnnnnnnnnnnnnnnnnnnnnnnnnnnnnnnnnnnnnnnnnnnnnnnnnnnnnnnnnnnnnnnnnnnnnnnnnnnnnnnnnnnnnnnnnnnnnnnnnnnnnnnnnnnnnnnnnnnnnnnnnnnnnnnnnnnnnnnnnnnnnnnnnnnnnnnnnnnnnnnnnnnnnnnnnnnnnnnnnnnnnnnnnnnnnnnnnnnnnnnnnnnnnnnnnnnnnnnnnnnnnnnnnnnnnnnnnnnnnnnnnnnnnnnnnnnnnnnnnnnnnnnnnnnnnnnnnnnnnnnnnnnnnnnnnnnnnnnnnnnnnnnnnnnnnnnnnnnnnnnnnnnnnnnnnnnnnnnnnnnnnnnnnnnnnnnnnnnnnnnnnnnnnnnnnnnnnnnnnnnnnnnnnnnnnnnnnnnnnnnnnnnnnnnnnnnnnnnnnnnnnnnnnnnnnnnnnnnnnnnnnnnnnnnnnnnnnnnnnnnnnnnnnnnnnnnnnnnnnnnnnnnnnnnnnnnnnnnnnnnnnnnnnnnnnnnnnnnnnnnnnnnnnnnnnnnnnnnnnnnnnnnnnnnnnnnnnnnnnnnnnnnnnnnnnnnnnnnnnnnnnnnnnnnnnnnnnnnnnnnnnnnnnnnnnnnnnnnnnnnnnnnnnnnnnnnnnnnnnnnnnnnnnnnnnnnnnnnnnnnnnnnnnnnnnnnnnnnnnnnnnnnnnnnnnnnnnnnnnnnnnnnnnnnnnnnnnnnnnnnnnnnnnnnnnnnnnnnnnnnnnnnnnnnnnnnnnnnnnnnnnnnnnnnnnnnnnnnnnnnnnnnnnnnnnnnnnnnnnnnnnnnnnnnnnnnnnnnnnnnnnnnnnnnnnnnnnnnnnnnnnnnnnnnnnnnnnnnnnnnnnnnnnnnnnnnnnnnnnnnnnnnnnnnnnnnnnnnnnnnnnnnnnnnnnnnnnnnnnnnnnnnnnnnnnnnnnnnnnnnnnnnnnnnnnnnnnnnnnnnnnnnnnnnnnnnnnnnnnnnnnnnnnnnnnnnnnnnnnnnnnnnnnnnnnnnnnnnnnnnnnnnnnnnnnnnnnnnnnnnnnnnnnnnnnnnnnnnnnnnnnnnnnnnnnnnnnnnnnnnnnnnnnnnnnnnnnnnnnnnnnnnnnnnnnnnnnnnnnnnnnnnnnnnnnnnnnnnnnnnnnnnnnnnnnnnnnnnnnnnnnnnnnnnnnnnnnnnnnnnnnnnnnnnnnnnnnnnnnnnnnnnnnnnnnnnnnnnnnnnnnnnnnnnnnnnnnnnnnnnnnnnnnnnnnnnnnnnnnnnnnnnnnnnnnnnnnnnnnnnnnnnnnnnnnnnnnnnnnnnnnnnnnnnnnnnnnnnnnnnnnnnnnnnnnnnnnnnnnnnnnnnnnnnnnnnnnnnnnnnnnnnnnnnnnnnnnnnnnnnnnnnnnnnnnnnnnnnnnnnnnnnnnnnnnnnnnnnnnnnnnnnnnnnnnnnnnnnnnnnnnnnnnnnnnnnnnnnnnnnnnnnnnnnnnnnnnnnnnnnnnnnnnnnnnnnnnnnnnnnnnnnnnnnnnnnnnnnnnnnnnnnnnnnnnnnnnnnnnnnnnnnnnnnnnnnnnnnnnnnnnnnnnnnnnnnnnnnnnnnnnnnnnnnnnnnnnnnnnnnnnnnnnnnnnnnnnnnnnnnnnnnnnnnnnnnnnnnnnnnnnnnnnnnnnnnnnnnnnnnnnnnnnnnnnnnnnnnnnnnnnnnnnnnnnnnnnnnnnnnnnnnnnnnnnnnnnnnnnnnnnnnnnnnnnnnnnnnnnnnnnnnnnnnnnnnnnnnnnnnnnnnnnnnnnnnnnnnnnnnnnnnnnnnnnnnnnnnnnnnnnnnnnnnnnnnnnnnnnnnnnnnnnnnnnnnnnnnnnnnnnnnnnnnnnnnnnnnnnnnnnnnnnnnnnnnnnnnnnnnnnnnnnnnnnnnnnnnnnnnnnnnnnnnnnnnnnnnnnnnnnnnnnnnnnnnnnnnnnnnnnnnnnnnnnnnnnnnnnnnnnnnnnnnnnnnnnnnnnnnnnnnnnnnnnnnnnnnnnnnnnnnnnnnnnnnnnnnnnnnnnnnnnnnnnnnnnnnnnnnnnnnnnnnnnnnnnnnnnnnnnnnnnnnnnnnnnnnnnnnnnnnnnnnnnnnnnnnnnnnnnnnnnnnnnnnnnnnnnnnnnnnnnnnnnnnnnnnnnnnnnnnnnnnnnnnnnnnnnnnnnnnnnnnnnnnnnnnnnnnnnnnnnnnnnnnnnnnnnnnnnnnnnnnnnnnnnnnnnnnnnnnnnnnnnnnnnnnnnnnnnnnnnnnnnnnnnnnnnnnnnnnnnnnnnnnnnnnnnnnnnnnnnnnnnnnnnnnnnnnnnnnnnnnnnnnnnnnnnnnnnnnnnnnnnnnnnnnnnnnnnnnnnnnnnnnnnnnnnnnnnnnnnnnnnnnnnnnnnnnnnnnnnnnnnnnnnnnnnnnnnnnnnnnnnnnnnnnnnnnnnnnnnnnnnnnnnnnnnnnnnnnnnnnnnnnnnnnnnnnnnnnnnnnnnnnnnnnnnnnnnnnnnnnnnnnnnnnnnnnnnnnnnnnnnnnnnnnnnnnnnnnnnnnnnnnnnnnnnnnnnnnnnnnnnnnnnnnnnnnnnnnnnnnnnnnnnnnnnnnnnnnnnnnnnnnnnnnnnnnnnnnnnnnnnnnnnnnnnnnnnnnnnnnnnnnnnnnnnnnnnnnnnnnnnnnnnnnnnnnnnnnnnnnnnnnnnnnnnnnnnnnnnnnnnnnnnnnnnnnnnnnnnnnnnnnnnnnnnnnnnnnnnnnnnnnnnnnnnnnnnnnnnnnnnnnnnnnnnnnnnnnnnnnnnnnnnnnnnnnnnnnnnnnnnnnnnnnnnnnnnnnnnnnnnnnnnnnnnnnnnnnnnnnnnnnnnnnnnnnnnnnnnnnnnnnnnnnnnnnnnnnnnnnnnnnnnnnnnnnnnnnnnnnnnnnnnnnnnnnnnnnnnnnnnnnnnnnnnnnnnnnnnnnnnnnnnnnnnnnnnnnnnnnnnnnnnnnnnnnnnnnnnnnnnnnnnnnnnnnnnnnnnnnnnnnnnnnnnnnnnnnnnnnnnnnnnnnnnnnnnnnnnnnnnnnnnnnnnnnnnnnnnnnnnnnnnnnnnnnnnnnnnnnnnnnnnnnnnnnnnnnnnnnnnnnnnnnnnnnnnnnnnnnnnnnnnnnnnnnnnnnnnnnnnnnnnnnnnnnnnnnnnnnnnnnnnnnnnnnnnnnnnnnnnnnnnnnnnnnnnnnnnnnnnnnnnnnnnnnnnnnnnnnnnnnnnnnnnnnnnnnnnnnnnnnnnnnnnnnnnnnnnnnnnnnnnnnnnnnnnnnnnnnnnnnnnnnnnnnnnnnnnnnnnnnnnnnnnnnnnnnnnnnnnnnnnnnnnnnnnnnnnnnnnnnnnnnnnnnnnnnnnnnnnnnnnnnnnnnnnnnnnnnnnnnnnnnnnnnnnnnnnnnnnnnnnnnnnnnnnnnnnnnnnnnnnnnnnnnnnnnnnnnnnnnnnnnnnnnnnnnnnnnnnnnnnnnnnnnnnnnnnnnnnnnnnnnnnnnnnnnnnnnnnnnnnnnnnnnnnnnnnnnnnnnnnnnnnnnnnnnnnnnnnnnnnnnnnnnnnnnnnnnnnnnnnnnnnnnnnnnnnnnnnnnnnnnnnnnnnnnnnnnnnnnnnnnnnnnnnnnnnnnnnnnnnnnnnnnnnnnnnnnnnnnnnnnnnnnnnnnnnnnnnnnnnnnnnnnnnnnnnnnnnnnnnnnnnnnnnnnnnnnnnnnnnnnnnnnnnnnnnnnnnnnnnnnnnnnnnnnnnnnnnnnnnnnnnnnnnnnnnnnnnnnnnnnnnnnnnnnnnnnnnnnnnnnnnnnnnnnnnnnnnnnnnnnnnnnnnnnnnnnnnnnnnnnnnnnnnnnnnnnnnnnnnnnnnnnnnnnnnnnnnnnnnnnnnnnnnnnnnnnnnnnnnnnnnnnnnnnnnnnnnnnnnnnnnnnnnnnnnnnnnnnnnnnnnnnnnnnnnnnnnnnnnnnnnnnnnnnnnnnnnnnnnnnnnnnnnnnnnnnnnnnnnnnnnnnnnnnnnnnnnnnnnnnnnnnnnnnnnnnnnnnnnnnnnnnnnnnnnnnnnnnnnnnnnnnnnnnnnnnnnnnnnnnnnnnnnnnnnnnnnnnnnnnnnnnnnnnnnnnnnnnnnnnnnnnnnnnnnnnnnnnnnnnnnnnnnnnnnnnnnnnnnnnnnnnnnnnnnnnnnnnnnnnnnnnnnnnnnnnnnnnnnnnnnnnnnnnnnnnnnnnnnnnnnnnnnnnnnnnnnnnnnnnnnnnnnnnnnnnnnnnnnnnnnnnnnnnnnnnnnnnnnnnnnnnnnnnnnnnnnnnnnnnnnnnnnnnnnnnnnnnnnnnnnnnnnnnnnnnnnnnnnnnnnnnnnnnnnnnnnnnnnnnnnnnnnnnnnnnnnnnnnnnnnnnnnnnnnnnnnnnnnnnnnnnnnnnnnnnnnnnnnnnnnnnnnnnnnnnnnnnnnnnnnnnnnnnnnnnnnnnnnnnnnnnnnnnnnnnnnnnnnnnnnnnnnnnnnnnnnnnnnnnnnnnnnnnnnnnnnnnnnnnnnnnnnnnnnnnnnnnnnnnnnnnnnnnnnnnnnnnnnnnnnnnnnnnnnnnnnnnnnnnnnnnnnnnnnnnnnnnnnnnnnnnnnnnnnnnnnnnnnnnnnnnnnnnnnnnnnnnnnnnnnnnnnnnnnnnnnnnnnnnnnnnnnnnnnnnnnnnnnnnnnnnnnnnnnnnnnnnnnnnnnnnnnnnnnnnnnnnnnnnnnnnnnnnnnnnnnnnnnnnnnnnnnnnnnnnnnnnnnnnnnnnnnnnnnnnnnnnnnnnnnnnnnnnnnnnnnnnnnnnnnnnnnnnnnnnnnnnnnnnnnnnnnnnnnnnnnnnnnnnnnnnnnnnnnnnnnnnnnnnnnnnnnnnnnnnnnnnnnnnnnnnnnnnnnnnnnnnnnnnnnnnnnnnnnnnnnnnnnnnnnnnnnnnnnnnnnnnnnnnnnnnnnnnnnnnnnnnnnnnnnnnnnnnnnnnnnnnnnnnnnnnnnnnnnnnnnnnnnnnnnnnnnnnnnnnnnnnnnnnnnnnnnnnnnnnnnnnnnnnnnnnnnnnnnnnnnnnnnnnnnnnnnnnnnnnnnnnnnnnnnnnnnnnnnnnnnnnnnnnnnnnnnnnnnnnnnnnnnnnnnnnnnnnnnnnnnnnnnnnnnnnnnnnnnnnnnnnnnnnnnnnnnnnnnnnnnnnnnnnnnnnnnnnnnnnnnnnnnnnnnnnnnnnnnnnnnnnnnnnnnnnnnnnnnnnnnnnnnnnnnnnnnnnnnnnnnnnnnnnnnnnnnnnnnnnnnnnnnnnnnnnnnnnnnnnnnnnnnnnnnnnnnnnnnnnnnnnnnnnnnnnnnnnnnnnnnnnnnnnnnnnnnnnnnnnnnnnnnnnnnnnnnnnnnnnnnnnnnnnnnnnnnnnnnnnnnnnnnnnnnnnnnnnnnnnnnnnnnnnnnnnnnnnnnnnnnnnnnnnnnnnnnnnnnnnnnnnnnnnnnnnnnnnnnnnnnnnnnnnnnnnnnnnnnnnnnnnnnnnnnnnnnnnnnnnnnnnnnnnnnnnnnnnnnnnnnnnnnnnnnnnnnnnnnnnnnnnnnnnnnnnnnnnnnnnnnnnnnnnnnnnnnnnnnnnnnnnnnnnnnnnnnnnnnnnnnnnnnnnnnnnnnnnnnnnnnnnnnnnnnnnnnnnnnnnnnnnnnnnnnnnnnnnnnnnnnnnnnnnnnnnnnnnnnnnnnnnnnnnnnnnnnnnnnnnnnnnnnnnnnnnnnnnnnnnnnnnnnnnnnnnnnnnnnnnnnnnnnnnnnnnnnnnnnnnnnnnnnnnnnnnnnnnnnnnnnnnnnnnnnnnnnnnnnnnnnnnnnnnnnnnnnnnnnnnnnnnnnnnnnnnnnnnnnnnnnnnnnnnnnnnnnnnnnnnnnnnnnnnnnnnnnnnnnnnnnnnnnnnnnnnnnnnnnnnnnnnnnnnnnnnnnnnnnnnnnnnnnnnnnnnnnnnnnnnnnnnnnnnnnnnnnnnnnnnnnnnnnnnnnnnnnnnnnnnnnnnnnnnnnnnnnnnnnnnnnnnnnnnnnnnnnnnnnnnnnnnnnnnnnnnnnnnnnnnnnnnnnnnnnnnnnnnnnnnnnnnnnnnnnnnnnnnnnnnnnnnnnnnnnnnnnnnnnnnnnnnnnnnnnnnnnnnnnnnnnnnnnnnnnnnnnnnnnnnnnnnnnnnnnnnnnnnnnnnnnnnnnnnnnnnnnnnnnnnnnnnnnnnnnnnnnnnnnnnnnnnnnnnnnnnnnnnnnnnnnnnnnnnnnnnnnnnnnnnnnnnnnnnnnnnnnnnnnnnnnnnnnnnnnnnnnnnnnnnnnnnnnnnnnnnnnnnnnnnnnnnnnnnnnnnnnnnnnnnnnnnnnnnnnnnnnnnnnnnnnnnnnnnnnnnnnnnnnnnnnnnnnnnnnnnnnnnnnnnnnnnnnnnnnnnnnnnnnnnnnnnnnnnnnnnnnnnnnnnnnnnnnnnnnnnnnnnnnnnnnnnnnnnnnnnnnnnnnnnnnnnnnnnnnnnnnnnnnnnnnnnnnnnnnnnnnnnnnnnnnnnnnnnnnnnnnnnnnnnnnnnnnnnnnnnnnnnnnnnnnnnnnnnnnnnnnnnnnnnnnnnnnnnnnnnnnnnnnnnnnnnnnnnnnnnnnnnnnnnnnnnnnnnnnnnnnnnnnnnnnnnnnnnnnnnnnnnnnnnnnnnnnnnnnnnnnnnnnnnnnnnnnnnnnnnnnnnnnnnnnnnnnnnnnnnnnnnnnnnnnnnnnnnnnnnnnnnnnnnnnnnnnnnnnnnnnnnnnnnnnnnnnnnnnnnnnnnnnnnnnnnnnnnnnnnnnnnnnnnnnnnnnnnnnnnnnnnnnnnnnnnnnnnnnnnnnnnnnnnnnnnnnnnnnnnnnnnnnnnnnnnnnnnnnnnnnnnnnnnnnnnnnnnnnnnnnnnnnnnnnnnnnnnnnnnnnnnnnnnnnnnnnnnnnnnnnnnnnnnnnnnnnnnnnnnnnnnnnnnnnnnnnnnnnnnnnnnnnnnnnnnnnnnnnnnnnnnnnnnnnnnnnnnnnnnnnnnnnnnnnnnnnnnnnnnnnnnnnnnnnnnnnnnnnnnnnnnnnnnnnnnnnnnnnnnnnnnnnnnnnnnnnnnnnnnnnnnnnnnnnnnnnnnnnnnnnnnnnnnnnnnnnnnnnnnnnnnnnnnnnnnnnnnnnnnnnnnnnnnnnnnnnnnnnnnnnnnnnnnnnnnnnnnnnnnnnnnnnnnnnnnnnnnnnnnnnnnnnnnnnnnnnnnnnnnnnnnnnnnnnnnnnnnnnnnnnnnnnnnnnnnnnnnnnnnnnnnnnnnnnnnnnnnnnnnnnnnnnnnnnnnnnnnnnnnnnnnnnnnnnnnnnnnnnnnnnnnnnnnnnnnnnnnnnnnnnnnnnnnnnnnnnnnnnnnnnnnnnnnnnnnnnnnnnnnnnnnnnnnnnnnnnnnnnnnnnnnnnnnnnnnnnnnnnnnnnnnnnnnnnnnnnnnnnnnnnnnnnnnnnnnnnnnnnnnnnnnnnnnnnnnnnnnnnnnnnnnnnnnnnnnnnnnnnnnnnnnnnnnnnnnnnnnnnnnnnnnnnnnnnnnnnnnnnnnnnnnnnnnnnnnnnnnnnnnnnnnnnnnnnnnnnnnnnnnnnnnnnnnnnnnnnnnnnnnnnnnnnnnnnnnnnnnnnnnnnnnnnnnnnnnnnnnnnnnnnnnnnnnnnnnnnnnnnnnnnnnnnnnnnnnnnnnnnnnnnnnnnnnnnnnnnnnnnnnnnnnnnnnnnnnnnnnnnnnnnnnnnnnnnnnnnnnnnnnnnnnnnnnnnnnnnnnnnnnnnnnnnnnnnnnnnnnnnnnnnnnnnnnnnnnnnnnnnnnnnnnnnnnnnnnnnnnnnnnnnnnnnnnnnnnnnnnnnnnnnnnnnnnnnnnnnnnnnnnnnnnnnnnnnnnnnnnnnnnnnnnnnnnnnnnnnnnnnnnnnnnnnnnnnnnnnnnnnnnnnnnnnnnnnnnnnnnnnnnnnnnnnnnnnnnnnnnnnnnnnnnnnnnnnnnnnnnnnnnnnnnnnnnnnnnnnnnnnnnnnnnnnnnnnnnnnnnnnnnnnnnnnnnnnnnnnnnnnnnnnnnnnnnnnnnnnnnnnnnnnnnnnnnnnnnnnnnnnnnnnnnnnnnnnnnnnnnnnnnnnnnnnnnnnnnnnnnnnnnnnnnnnnnnnnnnnnnnnnnnnnnnnnnnnnnnnnnnnnnnnnnnnnnnnnnnnnnnnnnnnnnnnnnnnnnnnnnnnnnnnnnnnnnnnnnnnnnnnnnnnnnnnnnnnnnnnnnnnnnnnnnnnnnnnnnnnnnnnnnnnnnnnnnnnnnnnnnnnnnnnnnnnnnnnnnnnnnnnnnnnnnnnnnnnnnnnnnnnnnnnnnnnnnnnnnnnnnnnnnnnnnnnnnnnnnnnnnnnnnnnnnnnnnnnnnnnnnnnnnnnnnnnnnnnnnnnnnnnnnnnnnnnnnnnnnnnnnnnnnnnnnnnnnnnnnnnnnnnnnnnnnnnnnnnnnnnnnnnnnnnnnnnnnnnnnnnnnnnnnnnnnnnnnnnnnnnnnnnnnnnnnnnnnnnnnnnnnnnnnnnnnnnnnnnnnnnnnnnnnnnnnnnnnnnnnnnnnnnnnnnnnnnnnnnnnnnnnnnnnnnnnnnnnnnnnnnnnnnnnnnnnnnnnnnnnnnnnnnnnnnnnnnnnnnnnnnnnnnnnnnnnnnnnnnnnnnnnnnnnnnnnnnnnnnnnnnnnnnnnnnnnnnnnnnnnnnnnnnnnnnnnnnnnnnnnnnnnnnnnnnnnnnnnnnnnnnnnnnnnnnnnnnnnnnnnnnnnnnnnnnnnnnnnnnnnnnnnnnnnnnnnnnnnnnnnnnnnnnnnnnnnnnnnnnnnnnnnnnnnnnnnnnnnnnnnnnnnnnnnnnnnnnnnnnnnnnnnnnnnnnnnnnnnnnnnnnnnnnnnnnnnnnnnnnnnnnnnnnnnnnnnnnnnnnnnnnnnnnnnnnnnnnnnnnnnnnnnnnnnnnnnnnnnnnnnnnnnnnnnnnnnnnnnnnnnnnnnnnnnnnnnnnnnnnnnnnnnnnnnnnnnnnnnnnnnnnnnnnnnnnnnnnnnnnnnnnnnnnnnnnnnnnnnnnnnnnnnnnnnnnnnnnnnnnnnnnnnnnnnnnnnnnnnnnnnnnnnnnnnnnnnnnnnnnnnnnnnnnnnnnnnnnnnnnnnnnnnnnnnnnnnnnnnnnnnnnnnnnnnnnnnnnnnnnnnnnnnnnnnnnnnnnnnnnnnnnnnnnnnnnnnnnnnnnnnnnnnnnnnnnnnnnnnnnnnnnnnnnnnnnnnnnnnnnnnnnnnnnnnnnnnnnnnnnnnnnnnnnnnnnnnnnnnnnnnnnnnnnnnnnnnnnnnnnnnnnnnnnnnnnnnnnnnnnnnnnnnnnnnnnnnnnnnnnnnnnnnnnnnnnnnnnnnnnnnnnnnnnnnnnnnnnnnnnnnnnnnnnnnnnnnnnnnnnnnnnnnnnnnnnnnnnnnnnnnnnnnnnnnnnnnnnnnnnnnnnnnnnnnnnnnnnnnnnnnnnnnnnnnnnnnnnnnnnnnnnnnnnnnnnnnnnnnnnnnnnnnnnnnnnnnnnnnnnnnnnnnnnnnnnnnnnnnnnnnnnnnnnnnnnnnnnnnnnnnnnnnnnnnnnnnnnnnnnnnnnnnnnnnnnnnnnnnnnnnnnnnnnnnnnnnnnnnnnnnnnnnnnnnnnnnnnnnnnnnnnnnnnnnnnnnnnnnnnnnnnnnnnnnnnnnnnnnnnnnnnnnnnnnnnnnnnnnnnnnnnnnnnnnnnnnnnnnnnnnnnnnnnnnnnnnnnnnnnnnnnnnnnnnnnnnnnnnnnnnnnnnnnnnnnnnnnnnnnnnnnnnnnnnnnnnnnnnnnnnnnnnnnnnnnnnnnnnnnnnnnnnnnnnnnnnnnnnnnnnnnnnnnnnnnnnnnnnnnnnnnnnnnnnnnnnnnnnnnnnnnnnnnnnnnnnnnnnnnnnnnnnnnnnnnnnnnnnnnnnnnnnnnnnnnnnnnnnnnnnnnnnnnnnnnnnnnnnnnnnnnnnnnnnnnnnnnnnnnnnnnnnnnnnnnnnnnnnnnnnnnnnnnnnnnnnnnnnnnnnnnnnnnnnnnnnnnnnnnnnnnnnnnnnnnnnnnnnnnnnnnnnnnnnnnnnnnnnnnnnnnnnnnnnnnnnnnnnnnnnnnnnnnnnnnnnnnnnnnnnnnnnnnnnnnnnnnnnnnnnnnnnnnnnnnnnnnnnnnnnnnnnnnnnnnnnnnnnnnnnnnnnnnnnnnnnnnnnnnnnnnnnnnnnnnnnnnnnnnnnnnnnnnnnnnnnnnnnnnnnnnnnnnnnnnnnnnnnnnnnnnnnnnnnnnnnnnnnnnnnnnnnnnnnnnnnnnnnnnnnnnnnnnnnnnnnnnnnnnnnnnnnnnnnnnnnnnnnnnnnnnnnnnnnnnnnnnnnnnnnnnnnnnnnnnnnnnnnnnnnnnnnnnnnnnnnnnnnnnnnnnnnnnnnnnnnnnnnnnnnnnnnnnnnnnnnnnnnnnnnnnnnnnnnnnnnnnnnnnnnnnnnnnnnnnnnnnnnnnnnnnnnnnnnnnnnnnnnnnnnnnnnnnnnnnnnnnnnnnnnnnnnnnnnnnnnnnnnnnnnnnnnnnnnnnnnnnnnnnnnnnnnnnnnnnnnnnnnnnnnnnnnnnnnnnnnnnnnnnnnnnnnnnnnnnnnnnnnnnnnnnnnnnnnnnnnnnnnnnnnnnnnnnnnnnnnnnnnnnnnnnnnnnnnnnnnnnnnnnnnnnnnnnnnnnnnnnnnnnnnnnnnnnnnnnnnnnnnnnnnnnnnnnnnnnnnnnnnnnnnnnnnnnnnnnnnnnnnnnnnnnnnnnnnnnnnnnnnnnnnnnnnnnnnnnnnnnnnnnnnnnnnnnnnnnnnnnnnnnnnnnnnnnnnnnnnnnnnnnnnnnnnnnnnnnnnnnnnnnnnnnnnnnnnnnnnnnnnnnnnnnnnnnnnnnnnnnnnnnnnnnnnnnnnnnnnnnnnnnnnnnnnnnnnnnnnnnnnnnnnnnnnnnnnnnnnnnnnnnnnnnnnnnnnnnnnnnnnnnnnnnnnnnnnnnnnnnnnnnnnnnnnnnnnnnnnnnnnnnnnnnnnnnnnnnnnnnnnnnnnnnnnnnnnnnnnnnnnnnnnnnnnnnnnnnnnnnnnnnnnnnnnnnnnnnnnnnnnnnnnnnnnnnnnnnnnnnnnnnnnnnnnnnnnnnnnnnnnnnnnnnnnnnnnnnnnnnnnnnnnnnnnnnnnnnnnnnnnnnnnnnnnnnnnnnnnnnnnnnnnnnnnnnnnnnnnnnnnnnnnnnnnnnnnnnnnnnnnnnnnnnnnnnnnnnnnnnnnnnnnnnnnnnnnnnnnnnnnnnnnnnnnnnnnnnnnnnnnnnnnnnnnnnnnnnnnnnnnnnnnnnnnnnnnnnnnnnnnnnnnnnnnnnnnnnnnnnnnnnnnnnnnnnnnnnnnnnnnnnnnnnnnnnnnnnnnnnnnnnnnnnnnnnnnnnnnnnnnnnnnnnnnnnnnnnnnnnnnnnnnnnnnnnnnnnnnnnnnnnnnnnnnnnnnnnnnnnnnnnnnnnnnnnnnnnnnnnnnnnnnnnnnnnnnnnnnnnnnnnnnnnnnnnnnnnnnnnnnnnnnnnnnnnnnnnnnnnnnnnnnnnnnnnnnnnnnnnnnnnnnnnnnnnnnnnnnnnnnnnnnnnnnnnnnnnnnnnnnnnnnnnnnnnnnnnnnnnnnnnnnnnnnnnnnnnnnnnnnnnnnnnnnnnnnnnnnnnnnnnnnnnnnnnnnnnnnnnnnnnnnnnnnnnnnnnnnnnnnnnnnnnnnnnnnnnnnnnnnnnnnnnnnnnnnnnnnnnnnnnnnnnnnnnnnnnnnnnnnnnnnnnnnnnnnnnnnnnnnnnnnnnnnnnnnnnnnnnnnnnnnnnnnnnnnnnnnnnnnnnnnnnnnnnnnnnnnnnnnnnnnnnnnnnnnnnnnnnnnnnnnnnnnnnnnnnnnnnnnnnnnnnnnnnnnnnnnnnnnnnnnnnnnnnnnnnnnnnnnnnnnnnnnnnnnnnnnnnnnnnnnnnnnnnnnnnnnnnnnnnnnnnnnnnnnnnnnnnnnnnnnnnnnnnnnnnnnnnnnnnnnnnnnnnnnnnnnnnnnnnnnnnnnnnnnnnnnnnnnnnnnnnnnnnnnnnnnnnnnnnnnnnnnnnnnnnnnnnnnnnnnnnnnnnnnnnnnnnnnnnnnnnnnnnnnnnnnnnnnnnnnnnnnnnnnnnnnnnnnnnnnnnnnnnnnnnnnnnnnnnnnnnnnnnnnnnnnnnnnnnnnnnnnnnnnnnnnnnnnnnnnnnnnnnnnnnnnnnnnnnnnnnnnnnnnnnnnnnnnnnnnnnnnnnnnnnnnnnnnnnnnnnnnnnnnnnnnnnnnnnnnnnnnnnnnnnnnnnnnnnnnnnnnnnnnnnnnnnnnnnnnnnnnnnnnnnnnnnnnnnnnnnnnnnnnnnnnnnnnnnnnnnnnnnnnnnnnnnnnnnnnnnnnnnnnnnnnnnnnnnnnnnnnnnnnnnnnnnnnnnnnnnnnnnnnnnnnnnnnnnnnnnnnnnnnnnnnnnnnnnnnnnnnnnnnnnnnnnnnnnnnnnnnnnnnnnnnnnnnnnnnnnnnnnnnnnnnnnnnnnnnnnnnnnnnnnnnnnnnnnnnnnnnnnnnnnnnnnnnnnnnnnnnnnnnnnnnnnnnnnnnnnnnnnnnnnnnnnnnnnnnnnnnnnnnnnnnnnnnnnnnnnnnnnnnnnnnnnnnnnnnnnnnnnnnnnnnnnnnnnnnnnnnnnnnnnnnnnnnnnnnnnnnnnnnnnnnnnnnnnnnnnnnnnnnnnnnnnnnnnnnnnnnnnnnnnnnnnnnnnnnnnnnnnnnnnnnnnnnnnnnnnnnnnnnnnnnnnnnnnnnnnnnnnnnnnnnnnnnnnnnnnnnnnnnnnnnnnnnnnnnnnnnnnnnnnnnnnnnnnnnnnnnnnnnnnnnnnnnnnnnnnnnnnnnnnnnnnnnnnnnnnnnnnnnnnnnnnnnnnnnnnnnnnnnnnnnnnnnnnnnnnnnnnnnnnnnnnnnnnnnnnnnnnnnnnnnnnnnnnnnnnnnnnnnnnnnnnnnnnnnnnnnnnnnnnnnnnnnnnnnnnnnnnnnnnnnnnnnnnnnnnnnnnnnnnnnnnnnnnnnnnnnnnnnnnnnnnnnnnnnnnnnnnnnnnnnnnnnnnnnnnnnnnnnnnnnnnnnnnnnnnnnnnnnnnnnnnnnnnnnnnnnnnnnnnnnnnnnnnnnnnnnnnnnnnnnnnnnnnnnnnnnnnnnnnnnnnnnnnnnnnnnnnnnnnnnnnnnnnnnnnnnnnnnnnnnnnnnnnnnnnnnnnnnnnnnnnnnnnnnnnnnnnnnnnnnnnnnnnnnnnnnnnnnnnnnnnnnnnnnnnnnnnnnnnnnnnnnnnnnnnnnnnnnnnnnnnnnnnnnnnnnnnnnnnnnnnnnnnnnnnnnnnnnnnnnnnnnnnnnnnnnnnnnnnnnnnnnnnnnnnnnnnnnnnnnnnnnnnnnnnnnnnnnnnnnnnnnnnnnnnnnnnnnnnnnnnnnnnnnnnnnnnnnnnnnnnnnnnnnnnnnnnnnnnnnnnnnnnnnnnnnnnnnnnnnnnnnnnnnnnnnnnnnnnnnnnnnnnnnnnnnnnnnnnnnnnnnnnnnnnnnnnnnnnnnnnnnnnnnnnnnnnnnnnnnnnnnnnnnnnnnnnnnnnnnnnnnnnnnnnnnnnnnnnnnnnnnnnnnnnnnnnnnnnnnnnnnnnnnnnnnnnnnnnnnnnnnnnnnnnnnnnnnnnnnnnnnnnnnnnnnnnnnnnnnnnnnnnnnnnnnnnnnnnnnnnnnnnnnnnnnnnnnnnnnnnnnnnnnnnnnnnnnnnnnnnnnnnnnnnnnnnnnnnnnnnnnnnnnnnnnnnnnnnnnnnnnnnnnnnnnnnnnnnnnnnnnnnnnnnnnnnnnnnnnnnnnnnnnnnnnnnnnnnnnnnnnnnnnnnnnnnnnnnnnnnnnnnnnnnnnnnnnnnnnnnnnnnnnnnnnnnnnnnnnnnnnnnnnnnnnnnnnnnnnnnnnnnnnnnnnnnnnnnnnnnnnnnnnnnnnnnnnnnnnnnnnnnnnnnnnnnnnnnnnnnnnnnnnnnnnnnnnnnnnnnnnnnnnnnnnnnnnnnnnnnnnnnnnnnnnnnnnnnnnnnnnnnnnnnnnnnnnnnnnnnnnnnnnnnnnnnnnnnnnnnnnnnnnnnnnnnnnnnnnnnnnnnnnnnnnnnnnnnnnnnnnnnnnnnnnnnnnnnnnnnnnnnnnnnnnnnnnnnnnnnnnnnnnnnnnnnnnnnnnnnnnnnnnnnnnnnnnnnnnnnnnnnnnnnnnnnnnnnnnnnnnnnnnnnnnnnnnnnnnnnnnnnnnnnnnnnnnnnnnnnnnnnnnnnnnnnnnnnnnnnnnnnnnnnnnnnnnnnnnnnnnnnnnnnnnnnnnnnnnnnnnnnnnnnnnnnnnnnnnnnnnnnnnnnnnnnnnnnnnnnnnnnnnnnnnnnnnnnnnnnnnnnnnnnnnnnnnnnnnnnnnnnnnnnnnnnnnnnnnnnnnnnnnnnnnnnnnnnnnnnnnnnnnnnnnnnnnnnnnnnnnnnnnnnnnnnnnnnnnnnnnnnnnnnnnnnnnnnnnnnnnnnnnnnnnnnnnnnnnnnnnnnnnnnnnnnnnnnnnnnnnnnnnnnnnnnnnnnnnnnnnnnnnnnnnnnnnnnnnnnnnnnnnnnnnnnnnnnnnnnnnnnnnnnnnnnnnnnnnnnnnnnnnnnnnnnnnnnnnnnnnnnnnnnnnnnnnnnnnnnnnnnnnnnnnnnnnnnnnnnnnnnnnnnnnnnnnnnnnnnnnnnnnnnnnnnnnnnnnnnnnnnnnnnnnnnnnnnnnnnnnnnnnnnnnnnnnnnnnnnnnnnnnnnnnnnnnnnnnnnnnnnnnnnnnnnnnnnnnnnnnnnnnnnnnnnnnnnnnnnnnnnnnnnnnnnnnnnnnnnnnnnnnnnnnnnnnnnnnnnnnnnnnnnnnnnnnnnnnnnnnnnnnnnnnnnnnnnnnnnnnnnnnnnnnnnnnnnnnnnnnnnnnnnnnnnnnnnnnnnnnnnnnnnnnnnnnnnnnnnnnnnnnnnnnnnnnnnnnnnnnnnnnnnnnnnnnnnnnnnnnnnnnnnnnnnnnnnnnnnnnnnnnnnnnnnnnnnnnnnnnnnnnnnnnnnnnnnnnnnnnnnnnnnnnnnnnnnnnnnnnnnnnnnnnnnnnnnnnnnnnnnnnnnnnnnnnnnnnnnnnnnnnnnnnnnnnnnnnnnnnnnnnnnnnnnnnnnnnnnnnnnnnnnnnnnnnnnnnnnnnnnnnnnnnnnnnnnnnnnnnnnnnnnnnnnnnnnnnnnnnnnnnnnnnnnnnnnnnnnnnnnnnnnnnnnnnnnnnnnnnnnnnnnnnnnnnnnnnnnnnnnnnnnnnnnnnnnnnnnnnnnnnnnnnnnnnnnnnnnnnnnnnnnnnnnnnnnnnnnnnnnnnnnnnnnnnnnnnnnnnnnnnnnnnnnnnnnnnnnnnnnnnnnnnnnnnnnnnnnnnnnnnnnnnnnnnnnnnnnnnnnnnnnnnnnnnnnnnnnnnnnnnnnnnnnnnnnnnnnnnnnnnnnnnnnnnnnnnnnnnnnnnnnnnnnnnnnnnnnnnnnnnnnnnnnnnnnnnnnnnnnnnnnnnnnnnnnnnnnnnnnnnnnnnnnnnnnnnnnnnnnnnnnnnnnnnnnnnnnnnnnnnnnnnnnnnnnnnnnnnnnnnnnnnnnnnnnnnnnnnnnnnnnnnnnnnnnnnnnnnnnnnnnnnnnnnnnnnnnnnnnnnnnnnnnnnnnnnnnnnnnnnnnnnnnnnnnnnnnnnnnnnnnnnnnnnnnnnnnnnnnnnnnnnnnnnnnnnnnnnnnnnnnnnnnnnnnnnnnnnnnnnnnnnnnnnnnnnnnnnnnnnnnnnnnnnnnnnnnnnnnnnnnnnnnnnnnnnnnnnnnnnnnnnnnnnnnnnnnnnnnnnnnnnnnnnnnnnnnnnnnnnnnnnnnnnnnnnnnnnnnnnnnnnnnnnnnnnnnnnnnnnnnnnnnnnnnnnnnnnnnnnnnnnnnnnnnnnnnnnnnnnnnnnnnnnnnnnnnnnnnnnnnnnnnnnnnnnnnnnnnnnnnnnnnnnnnnnnnnnnnnnnnnnnnnnnnnnnnnnnnnnnnnnnnnnnnnnnnnnnnnnnnnnnnnnnnnnnnnnnnnnnnnnnnnnnnnnnnnnnnnnnnnnnnnnnnnnnnnnnnnnnnnnnnnnnnnnnnnnnnnnnnnnnnnnnnnnnnnnnnnnnnnnnnnnnnnnnnnnnnnnnnnnnnnnnnnnnnnnnnnnnnnnnnnnnnnnnnnnnnnnnnnnnnnnnnnnnnnnnnnnnnnnnnnnnnnnnnnnnnnnnnnnnnnnnnnnnnnnnnnnnnnnnnnnnnnnnnnnnnnnnnnnnnnnnnnnnnnnnnnnnnnnnnnnnnnnnnnnnnnnnnnnnnnnnnnnnnnnnnnnnnnnnnnnnnnnnnnnnnnnnnnnnnnnnnnnnnnnnnnnnnnnnnnnnnnnnnnnnnnnnnnnnnnnnnnnnnnnnnnnnnnnnnnnnnnnnnnnnnnnnnnnnnnnnnnnnnnnnnnnnnnnnnnnnnnnnnnnnnnnnnnnnnnnnnnnnnnnnnnnnnnnnnnnnnnnnnnnnnnnnnnnnnnnnnnnnnnnnnnnnnnnnnnnnnnnnnnnnnnnnnnnnnnnnnnnnnnnnnnnnnnnnnnnnnnnnnnnnnnnnnnnnnnnnnnnnnnnnnnnnnnnnnnnnnnnnnnnnnnnnnnnnnnnnnnnnnnnnnnnnnnnnnnnnnnnnnnnnnnnnnnnnnnnnnnnnnnnnnnnnnnnnnnnnnnnnnnnnnnnnnnnnnnnnnnnnnnnnnnnnnnnnnnnnnnnnnnnnnnnnnnnnnnnnnnnnnnnnnnnnnnnnnnnnnnnnnnnnnnnnnnnnnnnnnnnnnnnnnnnnnnnnnnnnnnnnnnnnnnnnnnnnnnnnnnnnnnnnnnnnnnnnnnnnnnnnnnnnnnnnnnnnnnnnnnnnnnnnnnnnnnnnnnnnnnnnnnnnnnnnnnnnnnnnnnnnnnnnnnnnnnnnnnnnnnnnnnnnnnnnnnnnnnnnnnnnnnnnnnnnnnnnnnnnnnnnnnnnnnnnnnnnnnnnnnnnnnnnnnnnnnnnnnnnnnnnnnnnnnnnnnnnnnnnnnnnnnnnnnnnnnnnnnnnnnnnnnnnnnnnnnnnnnnnnnnnnnnnnnnnnnnnnnnnnnnnnnnnnnnnnnnnnnnnnnnnnnnnnnnnnnnnnnnnnnnnnnnnnnnnnnnnnnnnnnnnnnnnnnnnnnnnnnnnnnnnnnnnnnnnnnnnnnnnnnnnnnnnnnnnnnnnnnnnnnnnnnnnnnnnnnnnnnnnnnnnnnnnnnnnnnnnnnnnnnnnnnnnnnnnnnnnnnnnnnnnnnnnnnnnnnnnnnnnnnnnnnnnnnnnnnnnnnnnnnnnnnnnnnnnnnnnnnnnnnnnnnnnnnnnnnnnnnnnnnnnnnnnnnnnnnnnnnnnnnnnnnnnnnnnnnnnnnnnnnnnnnnnnnnnnnnnnnnnnnnnnnnnnnnnnnnnnnnnnnnnnnnnnnnnnnnnnnnnnnnnnnnnnnnnnnnnnnnnnnnnnnnnnnnnnnnnnnnnnnnnnnnnnnnnnnnnnnnnnnnnnnnnnnnnnnnnnnnnnnnnnnnnnnnnnnnnnnnnnnnnnnnnnnnnnnnnnnnnnnnnnnnnnnnnnnnnnnnnnnnnnnnnnnnnnnnnnnnnnnnnnnnnnnnnnnnnnnnnnnnnnnnnnnnnnnnnnnnnnnnnnnnnnnnnnnnnnnnnnnnnnnnnnnnnnnnnnnnnnnnnnnnnnnnnnnnnnnnnnnnnnnnnnnnnnnnnnnnnnnnnnnnnnnnnnnnnnnnnnnnnnnnnnnnnnnnnnnnnnnnnnnnnnnnnnnnnnnnnnnnnnnnnnnnnnnnnnnnnnnnnnnnnnnnnnnnnnnnnnnnnnnnnnnnnnnnnnnnnnnnnnnnnnnnnnnnnnnnnnnnnnnnnnnnnnnnnnnnnnnnnnnnnnnnnnnnnnnnnnnnnnnnnnnnnnnnnnnnnnnnnnnnnnnnnnnnnnnnnnnnnnnnnnnnnnnnnnnnnnnnnnnnnnnnnnnnnnnnnnnnnnnnnnnnnnnnnnnnnnnnnnnnnnnnnnnnnnnnnnnnnnnnnnnnnnnnnnnnnnnnnnnnnnnnnnnnnnnnnnnnnnnnnnnnnnnnnnnnnnnnnnnnnnnnnnnnnnnnnnnnnnnnnnnnnnnnnnnnnnnnnnnnnnnnnnnnnnnnnnnnnnnnnnnnnnnnnnnnnnnnnnnnnnnnnnnnnnnnnnnnnnnnnnnnnnnnnnnnnnnnnnnnnnnnnnnnnnnnnnnnnnnnnnnnnnnnnnnnnnnnnnnnnnnnnnnnnnnnnnnnnnnnnnnnnnnnnnnnnnnnnnnnnnnnnnnnnnnnnnnnnnnnnnnnnnnnnnnnnnnnnnnnnnnnnnnnnnnnnnnnnnnnnnnnnnnnnnnnnnnnnnnnnnnnnnnnnnnnnnnnnnnnnnnnnnnnnnnnnnnnnnnnnnnnnnnnnnnnnnnnnnnnnnnnnnnnnnnnnnnnnnnnnnnnnnnnnnnnnnnnnnnnnnnnnnnnnnnnnnnnnnnnnnnnnnnnnnnnnnnnnnnnnnnnnnnnnnnnnnnnnnnnnnnnnnnnnnnnnnnnnnnnnnnnnnnnnnnnnnnnnnnnnnnnnnnnnnnnnnnnnnnnnnnnnnnnnnnnnnnnnnnnnnnnnnnnnnnnnnnnnnnnnnnnnnnnnnnnnnnnnnnnnnnnnnnnnnnnnnnnnnnnnnnnnnnnnnnnnnnnnnnnnnnnnnnnnnnnnnnnnnnnnnnnnnnnnnnnnnnnnnnnnnnnnnnnnnnnnnnnnnnnnnnnnnnnnnnnnnnnnnnnnnnnnnnnnnnnnnnnnnnnnnnnnnnnnnnnnnnnnnnnnnnnnnnnnnnnnnnnnnnnnnnnnnnnnnnnnnnnnnnnnnnnnnnnnnnnnnnnnnnnnnnnnnnnnnnnnnnnnnnnnnnnnnnnnnnnnnnnnnnnnnnnnnnnnnnnnnnnnnnnnnnnnnnnnnnnnnnnnnnnnnnnnnnnnnnnnnnnnnnnnnnnnnnnnnnnnnnnnnnnnnnnnnnnnnnnnnnnnnnnnnnnnnnnnnnnnnnnnnnnnnnnnnnnnnnnnnnnnnnnnnnnnnnnnnnnnnnnnnnnnnnnnnnnnnnnnnnnnnnnnnnnnnnnnnnnnnnnnnnnnnnnnnnnnnnnnnnnnnnnnnnnnnnnnnnnnnnnnnnnnnnnnnnnnnnnnnnnnnnnnnnnnnnnnnnnnnnnnnnnnnnnnnnnnnnnnnnnnnnnnnnnnnnnnnnnnnnnnnnnnnnnnnnnnnnnnnnnnnnnnnnnnnnnnnnnnnnnnnnnnnnnnnnnnnnnnnnnnnnnnnnnnnnnnnnnnnnnnnnnnnnnnnnnnnnnnnnnnnnnnnnnnnnnnnnnnnnnnnnnnnnnnnnnnnnnnnnnnnnnnnnnnnnnnnnnnnnnnnnnnnnnnnnnnnnnnnnnnnnnnnnnnnnnnnnnnnnnnnnnnnnnnnnnnnnnnnnnnnnnnnnnnnnnnnnnnnnnnnnnnnnnnnnnnnnnnnnnnnnnnnnnnnnnnnnnnnnnnnnnnnnnnnnnnnnnnnnnnnnnnnnnnnnnnnnnnnnnnnnnnnnnnnnnnnnnnnnnnnnnnnnnnnnnnnnnnnnnnnnnnnnnnnnnnnnnnnnnnnnnnnnnnnnnnnnnnnnnnnnnnnnnnnnnnnnnnnnnnnnnnnnnnnnnnnnnnnnnnnnnnnnnnnnnnnnnnnnnnnnnnnnnnnnnnnnnnnnnnnnnnnnnnnnnnnnnnnnnnnnnnnnnnnnnnnnnnnnnnnnnnnnnnnnnnnnnnnnnnnnnnnnnnnnnnnnnnnnnnnnnnnnnnnnnnnnnnnnnnnnnnnnnnnnnnnnnnnnnnnnnnnnnnnnnnnnnnnnnnnnnnnnnnnnnnnnnnnnnnnnnnnnnnnnnnnnnnnnnnnnnnnnnnnnnnnnnnnnnnnnnnnnnnnnnnnnnnnnnnnnnnnnnnnnnnnnnnnnnnnnnnnnnnnnnnnnnnnnnnnnnnnnnnnnnnnnnnnnnnnnnnnnnnnnnnnnnnnnnnnnnnnnnnnnnnnnnnnnnnnnnnnnnnnnnnnnnnnnnnnnnnnnnnnnnnnnnnnnnnnnnnnnnnnnnnnnnnnnnnnnnnnnnnnnnnnnnnnnnnnnnnnnnnnnnnnnnnnnnnnnnnnnnnnnnnnnnnnnnnnnnnnnnnnnnnnnnnnnnnnnnnnnnnnnnnnnnnnnnnnnnnnnnnnnnnnnnnnnnnnnnnnnnnnnnnnnnnnnnnnnnnnnnnnnnnnnnnnnnnnnnnnnnnnnnnnnnnnnnnnnnnnnnnnnnnnnnnnnnnnnnnnnnnnnnnnnnnnnnnnnnnnnnnnnnnnnnnnnnnnnnnnnnnnnnnnnnnnnnnnnnnnnnnnnnnnnnnnnnnnnnnnnnnnnnnnnnnnnnnnnnnnnnnnnnnnnnnnnnnnnnnnnnnnnnnnnnnnnnnnnnnnnnnnnnnnnnnnnnnnnnnnnnnnnnnnnnnnnnnnnnnnnnnnnnnnnnnnnnnnnnnnnnnnnnnnnnnnnnnnnnnnnnnnnnnnnnnnnnnnnnnnnnnnnnnnnnnnnnnnnnnnnnnnnnnnnnnnnnnnnnnnnnnnnnnnnnnnnnnnnnnnnnnnnnnnnnnnnnnnnnnnnnnnnnnnnnnnnnnnnnnnnnnnnnnnnnnnnnnnnnnnnnnnnnnnnnnnnnnnnnnnnnnnnnnnnnnnnnnnnnnnnnnnnnnnnnnnnnnnnnnnnnnnnnnnnnnnnnnnnnnnnnnnnnnnnnnnnnnnnnnnnnnnnnnnnnnnnnnnnnnnnnnnnnnnnnnnnnnnnnnnnnnnnnnnnnnnnnnnnnnnnnnnnnnnnnnnnnnnnnnnnnnnnnnnnnnnnnnnnnnnnnnnnnnnnnnnnnnnnnnnnnnnnnnnnnnnnnnnnnnnnnnnnnnnnnnnnnnnnnnnnnnnnnnnnnnnnnnnnnnnnnnnnnnnnnnnnnnnnnnnnnnnnnnnnnnnnnnnnnnnnnnnnnnnnnnnnnnnnnnnnnnnnnnnnnnnnnnnnnnnnnnnnnnnnnnnnnnnnnnnnnnnnnnnnnnnnnnnnnnnnnnnnnnnnnnnnnnnnnnnnnnnnnnnnnnnnnnnnnnnnnnnnnnnnnnnnnnnnnnnnnnnnnnnnnnnnnnnnnnnnnnnnnnnnnnnnnnnnnnnnnnnnnnnnnnnnnnnnnnnnnnnnnnnnnnnnnnnnnnnnnnnnnnnnnnnnnnnnnnnnnnnnnnnnnnnnnnnnnnnnnnnnnnnnnnnnnnnnnnnnnnnnnnnnnnnnnnnnnnnnnnnnnnnnnnnnnnnnnnnnnnnnnnnnnnnnnnnnnnnnnnnnnnnnnnnnnnnnnnnnnnnnnnnnnnnnnnnnnnnnnnnnnnnnnnnnnnnnnnnnnnnnnnnnnnnnnnnnnnnnnnnnnnnnnnnnnnnnnnnnnnnnnnnnnnnnnnnnnnnnnnnnnnnnnnnnnnnnnnnnnnnnnnnnnnnnnnnnnnnnnnnnnnnnnnnnnnnnnnnnnnnnnnnnnnnnnnnnnnnnnnnnnnnnnnnnnnnnnnnnnnnnnnnnnnnnnnnnnnnnnnnnnnnnnnnnnnnnnnnnnnnnnnnnnnnnnnnnnnnnnnnnnnnnnnnnnnnnnnnnnnnnnnnnnnnnnnnnnnnnnnnnnnnnnnnnnnnnnnnnnnnnnnnnnnnnnnnnnnnnnnnnnnnnnnnnnnnnnnnnnnnnnnnnnnnnnnnnnnnnnnnnnnnnnnnnnnnnnnnnnnnnnnnnnnnnnnnnnnnnnnnnnnnnnnnnnnnnnnnnnnnnnnnnnnnnnnnnnnnnnnnnnnnnnnnnnnnnnnnnnnnnnnnnnnnnnnnnnnnnnnnnnnnnnnnnnnnnnnnnnnnnnnnnnnnnnnnnnnnnnnnnnnnnnnnnnnnnnnnnnnnnnnnnnnnnnnnnnnnnnnnnnnnnnnnnnnnnnnnnnnnnnnnnnnnnnnnnnnnnnnnnnnnnnnnnnnnnnnnnnnnnnnnnnnnnnnnnnnnnnnnnnnnnnnnnnnnnnnnnnnnnnnnnnnnnnnnnnnnnnnnnnnnnnnnnnnnnnnnnnnnnnnnnnnnnnnnnnnnnnnnnnnnnnnnnnnnnnnnnnnnnnnnnnnnnnnnnnnnnnnnnnnnnnnnnnnnnnnnnnnnnnnnnnnnnnnnnnnnnnnnnnnnnnnnnnnnnnnnnnnnnnnnnnnnnnnnnnnnnnnnnnnnnnnnnnnnnnnnnnnnnnnnnnnnnnnnnnnnnnnnnnnnnnnnnnnnnnnnnnnnnnnnnnnnnnnnnnnnnnnnnnnnnnnnnnnnnnnnnnnnnnnnnnnnnnnnnnnnnnnnnnnnnnnnnnnnnnnnnnnnnnnnnnnnnnnnnnnnnnnnnnnnnnnnnnnnnnnnnnnnnnnnnnnnnnnnnnnnnnnnnnnnnnnnnnnnnnnnnnnnnnnnnnnnnnnnnnnnnnnnnnnnnnnnnnnnnnnnnnnnnnnnnnnnnnnnnnnnnnnnnnnnnnnnnnnnnnnnnnnnnnnnnnnnnnnnnnnnnnnnnnnnnnnnnnnnnnnnnnnnnnnnnnnnnnnnnnnnnnnnnnnnnnnnnnnnnnnnnnnnnnnnnnnnnnnnnnnnnnnnnnnnnnnnnnnnnnnnnnnnnnnnnnnnnnnnnnnnnnnnnnnnnnnnnnnnnnnnnnnnnnnnnnnnnnnnnnnnnnnnnnnnnnnnnnnnnnnnnnnnnnnnnnnnnnnnnnnnnnnnnnnnnnnnnnnnnnnnnnnnnnnnnnnnnnnnnnnnnnnnnnnnnnnnnnnnnnnnnnnnnnnnnnnnnnnnnnnnnnnnnnnnnnnnnnnnnnnnnnnnnnnnnnnnnnnnnnnnnnnnnnnnnnnnnnnnnnnnnnnnnnnnnnnnnnnnnnnnnnnnnnnnnnnnnnnnnnnnnnnnnnnnnnnnnnnnnnnnnnnnnnnnnnnnnnnnnnnnnnnnnnnnnnnnnnnnnnnnnnnnnnnnnnnnnnnnnnnnnnnnnnnnnnnnnnnnnnnnnnnnnnnnnnnnnnnnnnnnnnnnnnnnnnnnnnnnnnnnnnnnnnnnnnnnnnnnnnnnnnnnnnnnnnnnnnnnnnnnnnnnnnnnnnnnnnnnnnnnnnnnnnnnnnnnnnnnnnnnnnnnnnnnnnnnnnnnnnnnnnnnnnnnnnnnnnnnnnnnnnnnnnnnnnnnnnnnnnnnnnnnnnnnnnnnnnnnnnnnnnnnnnnnnnnnnnnnnnnnnnnnnnnnnnnnnnnnnnnnnnnnnnnnnnnnnnnnnnnnnnnnnnnnnnnnnnnnnnnnnnnnnnnnnnnnnnnnnnnnnnnnnnnnnnnnnnnnnnnnnnnnnnnnnnnnnnnnnnnnnnnnnnnnnnnnnnnnnnnnnnnnnnnnnnnnnnnnnnnnnnnnnnnnnnnnnnnnnnnnnnnnnnnnnnnnnnnnnnnnnnnnnnnnnnnnnnnnnnnnnnnnnnnnnnnnnnnnnnnnnnnnnnnnnnnnnnnnnnnnnnnnnnnnnnnnnnnnnnnnnnnnnnnnnnnnnnnnnnnnnnnnnnnnnnnnnnnnnnnnnnnnnnnnnnnnnnnnnnnnnnnnnnnnnnnnnnnnnnnnnnnnnnnnnnnnnnnnnnnnnnnnnnnnnnnnnnnnnnnnnnnnnnnnnnnnnnnnnnnnnnnnnnnnnnnnnnnnnnnnnnnnnnnnnnnnnnnnnnnnnnnnnnnnnnnnnnnnnnnnnnnnnnnnnnnnnnnnnnnnnnnnnnnnnnnnnnnnnnnnnnnnnnnnnnnnnnnnnnnnnnnnnnnnnnnnnnnnnnnnnnnnnnnnnnnnnnnnnnnnnnnnnnnnnnnnnnnnnnnnnnnnnnnnnnnnnnnnnnnnnnnnnnnnnnnnnnnnnnnnnnnnnnnnnnnnnnnnnnnnnnnnnnnnnnnnnnnnnnnnnnnnnnnnnnnnnnnnnnnnnnnnnnnnnnnnnnnnnnnnnnnnnnnnnnnnnnnnnnnnnnnnnnnnnnnnnnnnnnnnnnnnnnnnnnnnnnnnnnnnnnnnnnnnnnnnnnnnnnnnnnnnnnnnnnnnnnnnnnnnnnnnnnnnnnnnnnnnnnnnnnnnnnnnnnnnnnnnnnnnnnnnnnnnnnnnnnnnnnnnnnnnnnnnnnnnnnnnnnnnnnnnnnnnnnnnnnnnnnnnnnnnnnnnnnnnnnnnnnnnnnnnnnnnnnnnnnnnnnnnnnnnnnnnnnnnnnnnnnnnnnnnnnnnnnnnnnnnnnnnnnnnnnnnnnnnnnnnnnnnnnnnnnnnnnnnnnnnnnnnnnnnnnnnnnnnnnnnnnnnnnnnnnnnnnnnnnnnnnnnnnnnnnnnnnnnnnnnnnnnnnnnnnnnnnnnnnnnnnnnnnnnnnnnnnnnnnnnnnnnnnnnnnnnnnnnnnnnnnnnnnnnnnnnnnnnnnnnnnnnnnnnnnnnnnnnnnnnnnnnnnnnnnnnnnnnnnnnnnnnnnnnnnnnnnnnnnnnnnnnnnnnnnnnnnnnnnnnnnnnnnnnnnnnnnnnnnnnnnnnnnnnnnnnnnnnnnnnnnnnnnnnnnnnnnnnnnnnnnnnnnnnnnnnnnnnnnnnnnnnnnnnnnnnnnnnnnnnnnnnnnnnnnnnnnnnnnnnnnnnnnnnnnnnnnnnnnnnnnnnnnnnnnnnnnnnnnnnnnnnnnnnnnnnnnnnnnnnnnnnnnnnnnnnnnnnnnnnnnnnnnnnnnnnnnnnnnnnnnnnnnnnnnnnnnnnnnnnnnnnnnnnnnnnnnnnnnnnnnnnnnnnnnnnnnnnnnnnnnnnnnnnnnnnnnnnnnnnnnnnnnnnnnnnnnnnnnnnnnnnnnnnnnnnnnnnnnnnnnnnnnnnnnnnnnnnnnnnnnnnnnnnnnnnnnnnnnnnnnnnnnnnnnnnnnnnnnnnnnnnnnnnnnnnnnnnnnnnnnnnnnnnnnnnnnnnnnnnnnnnnnnnnnnnnnnnnnnnnnnnnnnnnnnnnnnnnnnnnnnnnnnnnnnnnnnnnnnnnnnnnnnnnnnnnnnnnnnnnnnnnnnnnnnnnnnnnnnnnnnnnnnnnnnnnnnnnnnnnnnnnnnnnnnnnnnnnnnnnnnnnnnnnnnnnnnnnnnnnnnnnnnnnnnnnnnnnnnnnnnnnnnnnnnnnnnnnnnnnnnnnnnnnnnnnnnnnnnnnnnnnnnnnnnnnnnnnnnnnnnnnnnnnnnnnnnnnnnnnnnnnnnnnnnnnnnnnnnnnnnnnnnnnnnnnnnnnnnnnnnnnnnnnnnnnnnnnnnnnnnnnnnnnnnnnnnnnnnnnnnnnnnnnnnnnnnnnnnnnnnnnnnnnnnnnnnnnnnnnnnnnnnnnnnnnnnnnnnnnnnnnnnnnnnnnnnnnnnnnnnnnnnnnnnnnnnnnnnnnnnnnnnnnnnnnnnnnnnnnnnnnnnnnnnnnnnnnnnnnnnnnnnnnnnnnnnnnnnnnnnnnnnnnnnnnnnnnnnnnnnnnnnnnnnnnnnnnnnnnnnnnnnnnnnnnnnnnnnnnnnnnnnnnnnnnnnnnnnnnnnnnnnnnnnnnnnnnnnnnnnnnnnnnnnnnnnnnnnnnnnnnnnnnnnnnnnnnnnnnnnnnnnnnnnnnnnnnnnnnnnnnnnnnnnnnnnnnnnnnnnnnnnnnnnnnnnnnnnnnnnnnnnnnnnnnnnnnnnnnnnnnnnnnnnnnnnnnnnnnnnnnnnnnnnnnnnnnnnnnnnnnnnnnnnnnnnnnnnnnnnnnnnnnnnnnnnnnnnnnnnnnnnnnnnnnnnnnnnnnnnnnnnnnnnnnnnnnnnnnnnnnnnnnnnnnnnnnnnnnnnnnnnnnnnnnnnnnnnnnnnnnnnnnnnnnnnnnnnnnnnnnnnnnnnnnnnnnnnnnnnnnnnnnnnnnnnnnnnnnnnnnnnnnnnnnnnnnnnnnnnnnnnnnnnnnnnnnnnnnnnnnnnnnnnnnnnnnnnnnnnnnnnnnnnnnnnnnnnnnnnnnnnnnnnnnnnnnnnnnnnnnnnnnnnnnnnnnnnnnnnnnnnnnnnnnnnnnnnnnnnnnnnnnnnnnnnnnnnnnnnnnnnnnnnnnnnnnnnnnnnnnnnnnnnnnnnnnnnnnnnnnnnnnnnnnnnnnnnnnnnnnnnnnnnnnnnnnnnnnnnnnnnnnnnnnnnnnnnnnnnnnnnnnnnnnnnnnnnnnnnnnnnnnnnnnnnnnnnnnnnnnnnnnnnnnnnnnnnnnnnnnnnnnnnnnnnnnnnnnnnnnnnnnnnnnnnnnnnnnnnnnnnnnnnnnnnnnnnnnnnnnnnnnnnnnnnnnnnnnnnnnnnnnnnnnnnnnnnnnnnnnnnnnnnnnnnnnnnnnnnnnnnnnnnnnnnnnnnnnnnnnnnnnnnnnnnnnnnnnnnnnnnnnnnnnnnnnnnnnnnnnnnnnnnnnnnnnnnnnnnnnnnnnnnnnnnnnnnnnnnnnnnnnnnnnnnnnnnnnnnnnnnnnnnnnnnnnnnnnnnnnnnnnnnnnnnnnnnnnnnnnnnnnnnnnnnnnnnnnnnnnnnnnnnnnnnnnnnnnnnnnnnnnnnnnnnnnnnnnnnnnnnnnnnnnnnnnnnnnnnnnnnnnnnnnnnnnnnnnnnnnnnnnnnnnnnnnnnnnnnnnnnnnnnnnnnnnnnnnnnnnnnnnnnnnnnnnnnnnnnnnnnnnnnnnnnnnnnnnnnnnnnnnnnnnnnnnnnnnnnnnnnnnnnnnnnnnnnnnnnnnnnnnnnnnnnnnnnnnnnnnnnnnnnnnnnnnnnnnnnnnnnnnnnnnnnnnnnnnnnnnnnnnnnnnnnnnnnnnnnnnnnnnnnnnnnnnnnnnnnnnnnnnnnnnnnnnnnnnnnnnnnnnnnnnnnnnnnnnnnnnnnnnnnnnnnnnnnnnnnnnnnnnnnnnnnnnnnnnnnnnnnnnnnnnnnnnnnnnnnnnnnnnnnnnnnnnnnnnnnnnnnnnnnnnnnnnnnnnnnnnnnnnnnnnnnnnnnnnnnnnnnnnnnnnnnnnnnnnnnnnnnnnnnnnnnnnnnnnnnnnnnnnnnnnnnnnnnnnnnnnnnnnnnnnnnnnnnnnnnnnnnnnnnnnnnnnnnnnnnnnnnnnnnnnnnnnnnnnnnnnnnnnnnnnnnnnnnnnnnnnnnnnnnnnnnnnnnnnnnnnnnnnnnnnnnnnnnnnnnnnnnnnnnnnnnnnnnnnnnnnnnnnnnnnnnnnnnnnnnnnnnnnnnnnnnnnnnnnnnnnnnnnnnnnnnnnnnnnnnnnnnnnnnnnnnnnnnnnnnnnnnnnnnnnnnnnnnnnnnnnnnnnnnnnnnnnnnnnnnnnnnnnnnnnnnnnnnnnnnnnnnnnnnnnnnnnnnnnnnnnnnnnnnnnnnnnnnnnnnnnnnnnnnnnnnnnnnnnnnnnnnnnnnnnnnnnnnnnnnnnnnnnnnnnnnnnnnnnnnnnnnnnnnnnnnnnnnnnnnnnnnnnnnnnnnnnnnnnnnnnnnnnnnnnnnnnnnnnnnnnnnnnnnnnnnnnnnnnnnnnnnnnnnnnnnnnnnnnnnnnnnnnnnnnnnnnnnnnnnnnnnnnnnnnnnnnnnnnnnnnnnnnnnnnnnnnnnnnnnnnnnnnnnnnnnnnnnnnnnnnnnnnnnnnnnnnnnnnnnnnnnnnnnnnnnnnnnnnnnnnnnnnnnnnnnnnnnnnnnnnnnnnnnnnnnnnnnnnnnnnnnnnnnnnnnnnnnnnnnnnnnnnnnnnnnnnnnnnnnnnnnnnnnnnnnnnnnnnnnnnnnnnnnnnnnnnnnnnnnnnnnnnnnnnnnnnnnnnnnnnnnnnnnnnnnnnnnnnnnnnnnnnnnnnnnnnnnnnnnnnnnnnnnnnnnnnnnnnnnnnnnnnnnnnnnnnnnnnnnnnnnnnnnnnnnnnnnnnnnnnnnnnnnnnnnnnnnnnnnnnnnnnnnnnnnnnnnnnnnnnnnnnnnnnnnnnnnnnnnnnnnnnnnnnnnnnnnnnnnnnnnnnnnnnnnnnnnnnnnnnnnnnnnnnnnnnnnnnnnnnnnnnnnnnnnnnnnnnnnnnnnnnnnnnnnnnnnnnnnnnnnnnnnnnnnnnnnnnnnnnnnnnnnnnnnnnnnnnnnnnnnnnnnnnnnnnnnnnnnnnnnnnnnnnnnnnnnnnnnnnnnnnnnnnnnnnnnnnnnnnnnnnnnnnnnnnnnnnnnnnnnnnnnnnnnnnnnnnnnnnnnnnnnnnnnnnnnnnnnnnnnnnnnnnnnnnnnnnnnnnnnnnnnnnnnnnnnnnnnnnnnnnnnnnnnnnnnnnnnnnnnnnnnnnnnnnnnnnnnnnnnnnnnnnnnnnnnnnnnnnnnnnnnnnnnnnnnnnnnnnnnnnnnnnnnnnnnnnnnnnnnnnnnnnnnnnnnnnnnnnnnnnnnnnnnnnnnnnnnnnnnnnnnnnnnnnnnnnnnnnnnnnnnnnnnnnnnnnnnnnnnnnnnnnnnnnnnnnnnnnnnnnnnnnnnnnnnnnnnnnnnnnnnnnnnnnnnnnnnnnnnnnnnnnnnnnnnnnnnnnnnnnnnnnnnnnnnnnnnnnnnnnnnnnnnnnnnnnnnnnnnnnnnnnnnnnnnnnnnnnnnnnnnnnnnnnnnnnnnnnnnnnnnnnnnnnnnnnnnnnnnnnnnnnnnnnnnnnnnnnnnnnnnnnnnnnnnnnnnnnnnnnnnnnnnnnnnnnnnnnnnnnnnnnnnnnnnnnnnnnnnnnnnnnnnnnnnnnnnnnnnnnnnnnnnnnnnnnnnnnnnnnnnnnnnnnnnnnnnnnnnnnnnnnnnnnnnnnnnnnnnnnnnnnnnnnnnnnnnnnnnnnnnnnnnnnnnnnnnnnnnnnnnnnnnnnnnnnnnnnnnnnnnnnnnnnnnnnnnnnnnnnnnnnnnnnnnnnnnnnnnnnnnnnnnnnnnnnnnnnnnnnnnnnnnnnnnnnnnnnnnnnnnnnnnnnnnnnnnnnnnnnnnnnnnnnnnnnnnnnnnnnnnnnnnnnnnnnnnnnnnnnnnnnnnnnnnnnnnnnnnnnnnnnnnnnnnnnnnnnnnnnnnnnnnnnnnnnnnnnnnnnnnnnnnnnnnnnnnnnnnnnnnnnnnnnnnnnnnnnnnnnnnnnnnnnnnnnnnnnnnnnnnnnnnnnnnnnnnnnnnnnnnnnnnnnnnnnnnnnnnnnnnnnnnnnnnnnnnnnnnnnnnnnnnnnnnnnnnnnnnnnnnnnnnnnnnnnnnnnnnnnnnnnnnnnnnnnnnnnnnnnnnnnnnnnnnnnnnnnnnnnnnnnnnnnnnnnnnnnnnnnnnnnnnnnnnnnnnnnnnnnnnnnnnnnnnnnnnnnnnnnnnnnnnnnnnnnnnnnnnnnnnnnnnnnnnnnnnnnnnnnnnnnnnnnnnnnnnnnnnnnnnnnnnnnnnnnnnnnnnnnnnnnnnnnnnnnnnnnnnnnnnnnnnnnnnnnnnnnnnnnnnnnnnnnnnnnnnnnnnnnnnnnnnnnnnnnnnnnnnnnnnnnnnnnnnnnnnnnnnnnnnnnnnnnnnnnnnnnnnnnnnnnnnnnnnnnnnnnnnnnnnnnnnnnnnnnnnnnnnnnnnnnnnnnnnnnnnnnnnnnnnnnnnnnnnnnnnnnnnnnnnnnnnnnnnnnnnnnnnnnnnnnnnnnnnnnnnnnnnnnnnnnnnnnnnnnnnnnnnnnnnnnnnnnnnnnnnnnnnnnnnnnnnnnnnnnnnnnnnnnnnnnnnnnnnnnnnnnnnnnnnnnnnnnnnnnnnnnnnnnnnnnnnnnnnnnnnnnnnnnnnnnnnnnnnnnnnnnnnnnnnnnnnnnnnnnnnnnnnnnnnnnnnnnnnnnnnnnnnnnnnnnnnnnnnnnnnnnnnnnnnnnnnnnnnnnnnnnnnnnnnnnnnnnnnnnnnnnnnnnnnnnnnnnnnnnnnnnnnnnnnnnnnnnnnnnnnnnnnnnnnnnnnnnnnnnnnnnnnnnnnnnnnnnnnnnnnnnnnnnnnnnnnnnnnnnnnnnnnnnnnnnnnnnnnnnnnnnnnnnnnnnnnnnnnnnnnnnnnnnnnnnnnnnnnnnnnnnnnnnnnnnnnnnnnnnnnnnnnnnnnnnnnnnnnnnnnnnnnnnnnnnnnnnnnnnnnnnnnnnnnnnnnnnnnnnnnnnnnnnnnnnnnnnnnnnnnnnnnnnnnnnnnnnnnnnnnnnnnnnnnnnnnnnnnnnnnnnnnnnnnnnnnnnnnnnnnnnnnnnnnnnnnnnnnnnnnnnnnnnnnnnnnnnnnnnnnnnnnnnnnnnnnnnnnnnnnnnnnnnnnnnnnnnnnnnnnnnnnnnnnnnnnnnnnnnnnnnnnnnnnnnnnnnnnnnnnnnnnnnnnnnnnnnnnnnnnnnnnnnnnnnnnnnnnnnnnnnnnnnnnnnnnnnnnnnnnnnnnnnnnnnnnnnnnnnnnnnnnnnnnnnnnnnnnnnnnnnnnnnnnnnnnnnnnnnnnnnnnnnnnnnnnnnnnnnnnnnnnnnnnnnnnnnnnnnnnnnnnnnnnnnnnnnnnnnnnnnnnnnnnnnnnnnnnnnnnnnnnnnnnnnnnnnnnnnnnnnnnnnnnnnnnnnnnnnnnnnnnnnnnnnnnnnnnnnnnnnnnnnnnnnnnnnnnnnnnnnnnnnnnnnnnnnnnnnnnnnnnnnnnnnnnnnnnnnnnnnnnnnnnnnnnnnnnnnnnnnnnnnnnnnnnnnnnnnnnnnnnnnnnnnnnnnnnnnnnnnnnnnnnnnnnnnnnnnnnnnnnnnnnnnnnnnnnnnnnnnnnnnnnnnnnnnnnnnnnnnnnnnnnnnnnnnnnnnnnnnnnnnnnnnnnnnnnnnnnnnnnnnnnnnnnnnnnnnnnnnnnnnnnnnnnnnnnnnnnnnnnnnnnnnnnnnnnnnnnnnnnnnnnnnnnnnnnnnnnnnnnnnnnnnnnnnnnnnnnnnnnnnnnnnnnnnnnnnnnnnnnnnnnnnnnnnnnnnnnnnnnnnnnnnnnnnnnnnnnnnnnnnnnnnnnnnnnnnnnnnnnnnnnnnnnnnnnnnnnnnnnnnnnnnnnnnnnnnnnnnnnnnnnnnnnnnnnnnnnnnnnnnnnnnnnnnnnnnnnnnnnnnnnnnnnnnnnnnnnnnnnnnnnnnnnnnnnnnnnnnnnnnnnnnnnnnnnnnnnnnnnnnnnnnnnnnnnnnnnnnnnnnnnnnnnnnnnnnnnnnnnnnnnnnnnnnnnnnnnnnnnnnnnnnnnnnnnnnnnnnnnnnnnnnnnnnnnnnnnnnnnnnnnnnnnnnnnnnnnnnnnnnnnnnnnnnnnnnnnnnnnnnnnnnnnnnnnnnnnnnnnnnnnnnnnnnnnnnnnnnnnnnnnnnnnnnnnnnnnnnnnnnnnnnnnnnnnnnnnnnnnnnnnnnnnnnnnnnnnnnnnnnnnnnnnnnnnnnnnnnnnnnnnnnnnnnnnnnnnnnnnnnnnnnnnnnnnnnnnnnnnnnnnnnnnnnnnnnnnnnnnnnnnnnnnnnnnnnnnnnnnnnnnnnnnnnnnnnnnnnnnnnnnnnnnnnnnnnnnnnnnnnnnnnnnnnnnnnnnnnnnnnnnnnnnnnnnnnnnnnnnnnnnnnnnnnnnnnnnnnnnnnnnnnnnnnnnnnnnnnnnnnnnnnnnnnnnnnnnnnnnnnnnnnnnnnnnnnnnnnnnnnnnnnnnnnnnnnnnnnnnnnnnnnnnnnnnnnnnnnnnnnnnnnnnnnnnnnnnnnnnnnnnnnnnnnnnnnnnnnnnnnnnnnnnnnnnnnnnnnnnnnnnnnnnnnnnnnnnnnnnnnnnnnnnnnnnnnnnnnnnnnnnnnnnnnnnnnnnnnnnnnnnnnnnnnnnnnnnnnnnnnnnnnnnnnnnnnnnnnnnnnnnnnnnnnnnnnnnnnnnnnnnnnnnnnnnnnnnnnnnnnnnnnnnnnnnnnnnnnnnnnnnnnnnnnnnnnnnnnnnnnnnnnnnnnnnnnnnnnnnnnnnnnnnnnnnnnnnnnnnnnnnnnnnnnnnnnnnnnnnnnnnnnnnnnnnnnnnnnnnnnnnnnnnnnnnnnnnnnnnnnnnnnnnnnnnnnnnnnnnnnnnnnnnnnnnnnnnnnnnnnnnnnnnnnnnnnnnnnnnnnnnnnnnnnnnnnnnnnnnnnnnnnnnnnnnnnnnnnnnnnnnnnnnnnnnnnnnnnnnnnnnnnnnnnnnnnnnnnnnnnnnnnnnnnnnnnnnnnnnnnnnnnnnnnnnnnnnnnnnnnnnnnnnnnnnnnnnnnnnnnnnnnnnnnnnnnnnnnnnnnnnnnnnnnnnnnnnnnnnnnnnnnnnnnnnnnnnnnnnnnnnnnnnnnnnnnnnnnnnnnnnnnnnnnnnnnnnnnnnnnnnnnnnnnnnnnnnnnnnnnnnnnnnnnnnnnnnnnnnnnnnnnnnnnnnnnnnnnnnnnnnnnnnnnnnnnnnnnnnnnnnnnnnnnnnnnnnnnnnnnnnnnnnnnnnnnnnnnnnnnnnnnnnnnnnnnnnnnnnnnnnnnnnnnnnnnnnnnnnnnnnnnnnnnnnnnnnnnnnnnnnnnnnnnnnnnnnnnnnnnnnnnnnnnnnnnnnnnnnnnnnnnnnnnnnnnnnnnnnnnnnnnnnnnnnnnnnnnnnnnnnnnnnnnnnnnnnnnnnnnnnnnnnnnnnnnnnnnnnnnnnnnnnnnnnnnnnnnnnnnnnnnnnnnnnnnnnnnnnnnnnnnnnnnnnnnnnnnnnnnnnnnnnnnnnnnnnnnnnnnnnnnnnnnnnnnnnnnnnnnnnnnnnnnnnnnnnnnnnnnnnnnnnnnnnnnnnnnnnnnnnnnnnnnnnnnnnnnnnnnnnnnnnnnnnnnnnnnnnnnnnnnnnnnnnnnnnnnnnnnnnnnnnnnnnnnnnnnnnnnnnnnnnnnnnnnnnnnnnnnnnnnnnnnnnnnnnnnnnnnnnnnnnnnnnnnnnnnnnnnnnnnnnnnnnnnnnnnnnnnnnnnnnnnnnnnnnnnnnnnnnnnnnnnnnnnnnnnnnnnnnnnnnnnnnnnnnnnnnnnnnnnnnnnnnnnnnnnnnnnnnnnnnnnnnnnnnnnnnnnnnnnnnnnnnnnnnnnnnnnnnnnnnnnnnnnnnnnnnnnnnnnnnnnnnnnnnnnnnnnnnnnnnnnnnnnnnnnnnnnnnnnnnnnnnnnnnnnnnnnnnnnnnnnnnnnnnnnnnnnnnnnnnnnnnnnnnnnnnnnnnnnnnnnnnnnnnnnnnnnnnnnnnnnnnnnnnnnnnnnnnnnnnnnnnnnnnnnnnnnnnnnnnnnnnnnnnnnnnnnnnnnnnnnnnnnnnnnnnnnnnnnnnnnnnnnnnnnnnnnnnnnnnnnnnnnnnnnnnnnnnnnnnnnnnnnnnnnnnnnnnnnnnnnnnnnnnnnnnnnnnnnnnnnnnnnnnnnnnnnnnnnnnnnnnnnnnnnnnnnnnnnnnnnnnnnnnnnnnnnnnnnnnnnnnnnnnnnnnnnnnnnnnnnnnnnnnnnnnnnnnnnnnnnnnnnnnnnnnnnnnnnnnnnnnnnnnnnnnnnnnnnnnnnnnnnnnnnnnnnnnnnnnnnnnnnnnnnnnnnnnnnnnnnnnnnnnnnnnnnnnnnnnnnnnnnnnnnnnnnnnnnnnnnnnnnnnnnnnnnnnnnnnnnnnnnnnnnnnnnnnnnnnnnnnnnnnnnnnnnnnnnnnnnnnnnnnnnnnnnnnnnnnnnnnnnnnnnnnnnnnnnnnnnnnnnnnnnnnnnnnnnnnnnnnnnnnnnnnnnnnnnnnnnnnnnnnnnnnnnnnnnnnnnnnnnnnnnnnnnnnnnnnnnnnnnnnnnnnnnnnnnnnnnnnnnnnnnnnnnnnnnnnnnnnnnnnnnnnnnnnnnnnnnnnnnnnnnnnnnnnnnnnnnnnnnnnnnnnnnnnnnnnnnnnnnnnnnnnnnnnnnnnnnnnnnnnnnnnnnnnnnnnnnnnnnnnnnnnnnnnnnnnnnnnnnnnnnnnnnnnnnnnnnnnnnnnnnnnnnnnnnnnnnnnnnnnnnnnnnnnnnnnnnnnnnnnnnnnnnnnnnnnnnnnnnnnnnnnnnnnnnnnnnnnnnnnnnnnnnnnnnnnnnnnnnnnnnnnnnnnnnnnnnnnnnnnnnnnnnnnnnnnnnnnnnnnnnnnnnnnnnnnnnnnnnnnnnnnnnnnnnnnnnnnnnnnnnnnnnnnnnnnnnnnnnnnnnnnnnnnnnnnnnnnnnnnnnnnnnnnnnnnnnnnnnnnnnnnnnnnnnnnnnnnnnnnnnnnnnnnnnnnnnnnnnnnnnnnnnnnnnnnnnnnnnnnnnnnnnnnnnnnnnnnnnnnnnnnnnnnnnnnnnnnnnnnnnnnnnnnnnnnnnnnnnnnnnnnnnnnnnnnnnnnnnnnnnnnnnnnnnnnnnnnnnnnnnnnnnnnnnnnnnnnnnnnnnnnnnnnnnnnnnnnnnnnnnnnnnnnnnnnnnnnnnnnnnnnnnnnnnnnnnnnnnnnnnnnnnnnnnnnnnnnnnnnnnnnnnnnnnnnnnnnnnnnnnnnnnnnnnnnnnnnnnnnnnnnnnnnnnnnnnnnnnnnnnnnnnnnnnnnnnnnnnnnnnnnnnnnnnnnnnnnnnnnnnnnnnnnnnnnnnnnnnnnnnnnnnnnnnnnnnnnnnnnnnnnnnnnnnnnnnnnnnnnnnnnnnnnnnnnnnnnnnnnnnnnnnnnnnnnnnnnnnnnnnnnnnnnnnnnnnnnnnnnnnnnnnnnnnnnnnnnnnnnnnnnnnnnnnnnnnnnnnnnnnnnnnnnnnnnnnnnnnnnnnnnnnnnnnnnnnnnnnnnnnnnnnnnnnnnnnnnnnnnnnnnnnnnnnnnnnnnnnnnnnnnnnnnnnnnnnnnnnnnnnnnnnnnnnnnnnnnnnnnnnnnnnnnnnnnnnnnnnnnnnnnnnnnnnnnnnnnnnnnnnnnnnnnnnnnnnnnnnnnnnnnnnnnnnnnnnnnnnnnnnnnnnnnnnnnnnnnnnnnnnnnnnnnnnnnnnnnnnnnnnnnnnnnnnnnnnnnnnnnnnnnnnnnnnnnnnnnnnnnnnnnnnnnnnnnnnnnnnnnnnnnnnnnnnnnnnnnnnnnnnnnnnnnnnnnnnnnnnnnnnnnnnnnnnnnnnnnnnnnnnnnnnnnnnnnnnnnnnnnnnnnnnnnnnnnnnnnnnnnnnnnnnnnnnnnnnnnnnnnnnnnnnnnnnnnnnnnnnnnnnnnnnnnnnnnnnnnnnnnnnnnnnnnnnnnnnnnnnnnnnnnnnnnnnnnnnnnnnnnnnnnnnnnnnnnnnnnnnnnnnnnnnnnnnnnnnnnnnnnnnnnnnnnnnnnnnnnnnnnnnnnnnnnnnnnnnnnnnnnnnnnnnnnnnnnnnnnnnnnnnnnnnnnnnnnnnnnnnnnnnnnnnnnnnnnnnnnnnnnnnnnnnnnnnnnnnnnnnnnnnnnnnnnnnnnnnnnnnnnnnnnnnnnnnnnnnnnnnnnnnnnnnnnnnnnnnnnnnnnnnnnnnnnnnnnnnnnnnnnnnnnnnnnnnnnnnnnnnnnnnnnnnnnnnnnnnnnnnnnnnnnnnnnnnnnnnnnnnnnnnnnnnnnnnnnnnnnnnnnnnnnnnnnnnnnnnnnnnnnnnnnnnnnnnnnnnnnnnnnnnnnnnnnnnnnnnnnnnnnnnnnnnnnnnnnnnnnnnnnnnnnnnnnnnnnnnnnnnnnnnnnnnnnnnnnnnnnnnnnnnnnnnnnnnnnnnnnnnnnnnnnnnnnnnnnnnnnnnnnnnnnnnnnnnnnnnnnnnnnnnnnnnnnnnnnnnnnnnnnnnnnnnnnnnnnnnnnnnnnnnnnnnnnnnnnnnnnnnnnnnnnnnnnnnnnnnnnnnnnnnnnnnnnnnnnnnnnnnnnnnnnnnnnnnnnnnnnnnnnnnnnnnnnnnnnnnnnnnnnnnnnnnnnnnnnnnnnnnnnnnnnnnnnnnnnnnnnnnnnnnnnnnnnnnnnnnnnnnnnnnnnnnnnnnnnnnnnnnnnnnnnnnnnnnnnnnnnnnnnnnnnnnnnnnnnnnnnnnnnnnnnnnnnnnnnnnnnnnnnnnnnnnnnnnnnnnnnnnnnnnnnnnnnnnnnnnnnnnnnnnnnnnnnnnnnnnnnnnnnnnnnnnnnnnnnnnnnnnnnnnnnnnnnnnnnnnnnnnnnnnnnnnnnnnnnnnnnnnnnnnnnnnnnnnnnnnnnnnnnnnnnnnnnnnnnnnnnnnnnnnnnnnnnnnnnnnnnnnnnnnnnnnnnnnnnnnnnnnnnnnnnnnnnnnnnnnnnnnnnnnnnnnnnnnnnnnnnnnnnnnnnnnnnnnnnnnnnnnnnnnnnnnnnnnnnnnnnnnnnnnnnnnnnnnnnnnnnnnnnnnnnnnnnnnnnnnnnnnnnnnnnnnnnnnnnnnnnnnnnnnnnnnnnnnnnnnnnnnnnnnnnnnnnnnnnnnnnnnnnnnnnnnnnnnnnnnnnnnnnnnnnnnnnnnnnnnnnnnnnnnnnnnnnnnnnnnnnnnnnnnnnnnnnnnnnnnnnnnnnnnnnnnnnnnnnnnnnnnnnnnnnnnnnnnnnnnnnnnnnnnnnnnnnnnnnnnnnnnnnnnnnnnnnnnnnnnnnnnnnnnnnnnnnnnnnnnnnnnnnnnnnnnnnnnnnnnnnnnnnnnnnnnnnnnnnnnnnnnnnnnnnnnnnnnnnnnnnnnnnnnnnnnnnnnnnnnnnnnnnnnnnnnnnnnnnnnnnnnnnnnnnnnnnnnnnnnnnnnnnnnnnnnnnnnnnnnnnnnnnnnnnnnnnnnnnnnnnnnnnnnnnnnnnnnnnnnnnnnnnnnnnnnnnnnnnnnnnnnnnnnnnnnnnnnnnnnnnnnnnnnnnnnnnnnnnnnnnnnnnnnnnnnnnnnnnnnnnnnnnnnnnnnnnnnnnnnnnnnnnnnnnnnnnnnnnnnnnnnnnnnnnnnnnnnnnnnnnnnnnnnnnnnnnnnnnnnnnnnnnnnnnnnnnnnnnnnnnnnnnnnnnnnnnnnnnnnnnnnnnnnnnnnnnnnnnnnnnnnnnnnnnnnnnnnnnnnnnnnnnnnnnnnnnnnnnnnnnnnnnnnnnnnnnnnnnnnnnnnnnnnnnnnnnnnnnnnnnnnnnnnnnnnnnnnnnnnnnnnnnnnnnnnnnnnnnnnnnnnnnnnnnnnnnnnnnnnnnnnnnnnnnnnnnnnnnnnnnnnnnnnnnnnnnnnnnnnnnnnnnnnnnnnnnnnnnnnnnnnnnnnnnnnnnnnnnnnnnnnnnnnnnnnnnnnnnnnnnnnnnnnnnnnnnnnnnnnnnnnnnnnnnnnnnnnnnnnnnnnnnnnnnnnnnnnnnnnnnnnnnnnnnnnnnnnnnnnnnnnnnnnnnnnnnnnnnnnnnnnnnnnnnnnnnnnnnnnnnnnnnnnnnnnnnnnnnnnnnnnnnnnnnnnnnnnnnnnnnnnnnnnnnnnnnnnnnnnnnnnnnnnnnnnnnnnnnnnnnnnnnnnnnnnnnnnnnnnnnnnnnnnnnnnnnnnnnnnnnnnnnnnnnnnnnnnnnnnnnnnnnnnnnnnnnnnnnnnnnnnnnnnnnnnnnnnnnnnnnnnnnnnnnnnnnnnnnnnnnnnnnnnnnnnnnnnnnnnnnnnnnnnnnnnnnnnnnnnnnnnnnnnnnnnnnnnnnnnnnnnnnnnnnnnnnnnnnnnnnnnnnnnnnnnnnnnnnnnnnnnnnnnnnnnnnnnnnnnnnnnnnnnnnnnnnnnnnnnnnnnnnnnnnnnnnnnnnnnnnnnnnnnnnnnnnnnnnnnnnnnnnnnnnnnnnnnnnnnnnnnnnnnnnnnnnnnnnnnnnnnnnnnnnnnnnnnnnnnnnnnnnnnnnnnnnnnnnnnnnnnnnnnnnnnnnnnnnnnnnnnnnnnnnnnnnnnnnnnnnnnnnnnnnnnnnnnnnnnnnnnnnnnnnnnnnnnnnnnnnnnnnnnnnnnnnnnnnnnnnnnnnnnnnnnnnnnnnnnnnnnnnnnnnnnnnnnnnnnnnnnnnnnnnnnnnnnnnnnnnnnnnnnnnnnnnnnnnnnnnnnnnnnnnnnnnnnnnnnnnnnnnnnnnnnnnnnnnnnnnnnnnnnnnnnnnnnnnnnnnnnnnnnnnnnnnnnnnnnnnnnnnnnnnnnnnnnnnnnnnnnnnnnnnnnnnnnnnnnnnnnnnnnnnnnnnnnnnnnnnnnnnnnnnnnnnnnnnnnnnnnnnnnnnnnnnnnnnnnnnnnnnnnnnnnnnnnnnnnnnnnnnnnnnnnnnnnnnnnnnnnnnnnnnnnnnnnnnnnnnnnnnnnnnnnnnnnnnnnnnnnnnnnnnnnnnnnnnnnnnnnnnnnnnnnnnnnnnnnnnnnnnnnnnnnnnnnnnnnnnnnnnnnnnnnnnnnnnnnnnnnnnnnnnnnnnnnnnnnnnnnnnnnnnnnnnnnnnnnnnnnnnnnnnnnnnnnnnnnnnnnnnnnnnnnnnnnnnnnnnnnnnnnnnnnnnnnnnnnnnnnnnnnnnnnnnnnnnnnnnnnnnnnnnnnnnnnnnnnnnnnnnnnnnnnnnnnnnnnnnnnnnnnnnnnnnnnnnnnnnnnnnnnnnnnnnnnnnnnnnnnnnnnnnnnnnnnnnnnnnnnnnnnnnnnnnnnnnnnnnnnnnnnnnnnnnnnnnnnnnnnnnnnnnnnnnnnnnnnnnnnnnnnnnnnnnnnnnnnnnnnnnnnnnnnnnnnnnnnnnnnnnnnnnnnnnnnnnnnnnnnnnnnnnnnnnnnnnnnnnnnnnnnnnnnnnnnnnnnnnnnnnnnnnnnnnnnnnnnnnnnnnnnnnnnnnnnnnnnnnnnnnnnnnnnnnnnnnnnnnnnnnnnnnnnnnnnnnnnnnnnnnnnnnnnnnnnnnnnnnnnnnnnnnnnnnnnnnnnnnnnnnnnnnnnnnnnnnnnnnnnnnnnnnnnnnnnnnnnnnnnnnnnnnnnnnnnnnnnnnnnnnnnnnnnnnnnnnnnnnnnnnnnnnnnnnnnnnnnnnnnnnnnnnnnnnnnnnnnnnnnnnnnnnnnnnnnnnnnnnnnnnnnnnnnnnnnnnnnnnnnnnnnnnnnnnnnnnnnnnnnnnnnnnnnnnnnnnnnnnnnnnnnnnnnnnnnnnnnnnnnnnnnnnnnnnnnnnnnnnnnnnnnnnnnnnnnnnnnnnnnnnnnnnnnnnnnnnnnnnnnnnnnnnnnnnnnnnnnnnnnnnnnnnnnnnnnnnnnnnnnnnnnnnnnnnnnnnnnnnnnnnnnnnnnnnnnnnnnnnnnnnnnnnnnnnnnnnnnnnnnnnnnnnnnnnnnnnnnnnnnnnnnnnnnnnnnnnnnnnnnnnnnnnnnnnnnnnnnnnnnnnnnnnnnnnnnnnnnnnnnnnnnnnnnnnnnnnnnnnnnnnnnnnnnnnnnnnnnnnnnnnnnnnnnnnnnnnnnnnnnnnnnnnnnnnnnnnnnnnnnnnnnnnnnnnnnnnnnnnnnnnnnnnnnnnnnnnnnnnnnnnnnnnnnnnnnnnnnnnnnnnnnnnnnnnnnnnnnnnnnnnnnnnnnnnnnnnnnnnnnnnnnnnnnnnnnnnnnnnnnnnnnnnnnnnnnnnnnnnnnnnnnnnnnnnnnnnnnnnnnnnnnnnnnnnnnnnnnnnnnnnnnnnnnnnnnnnnnnnnnnnnnnnnnnnnnnnnnnnnnnnnnnnnnnnnnnnnnnnnnnnnnnnnnnnnnnnnnnnnnnnnnnnnnnnnnnnnnnnnnnnnnnnnnnnnnnnnnnnnnnnnnnnnnnnnnnnnnnnnnnnnnnnnnnnnnnnnnnnnnnnnnnnnnnnnnnnnnnnnnnnnnnnnnnnnnnnnnnnnnnnnnnnnnnnnnnnnnnnnnnnnnnnnnnnnnnnnnnnnnnnnnnnnnnnnnnnnnnnnnnnnnnnnnnnnnnnnnnnnnnnnnnnnnnnnnnnnnnnnnnnnnnnnnnnnnnnnnnnnnnnnnnnnnnnnnnnnnnnnnnnnnnnnnnnnnnnnnnnnnnnnnnnnnnnnnnnnnnnnnnnnnnnnnnnnnnnnnnnnnnnnnnnnnnnnnnnnnnnnnnnnnnnnnnnnnnnnnnnnnnnnnnnnnnnnnnnnnnnnnnnnnnnnnnnnnnnnnnnnnnnnnnnnnnnnnnnnnnnnnnnnnnnnnnnnnnnnnnnnnnnnnnnnnnnnnnnnnnnnnnnnnnnnnnnnnnnnnnnnnnnnnnnnnnnnnnnnnnnnnnnnnnnnnnnnnnnnnnnnnnnnnnnnnnnnnnnnnnnnnnnnnnnnnnnnnnnnnnnnnnnnnnnnnnnnnnnnnnnnnnnnnnnnnnnnnnnnnnnnnnnnnnnnnnnnnnnnnnnnnnnnnnnnnnnnnnnnnnnnnnnnnnnnnnnnnnnnnnnnnnnnnnnnnnnnnnnnnnnnnnnnnnnnnnnnnnnnnnnnnnnnnnnnnnnnnnnnnnnnnnnnnnnnnnnnnnnnnnnnnnnnnnnnnnnnnnnnnnnnnnnnnnnnnnnnnnnnnnnnnnnnnnnnnnnnnnnnnnnnnnnnnnnnnnnnnnnnnnnnnnnnnnnnnnnnnnnnnnnnnnnnnnnnnnnnnnnnnnnnnnnnnnnnnnnnnnnnnnnnnnnnnnnnnnnnnnnnnnnnnnnnnnnnnnnnnnnnnnnnnnnnnnnnnnnnnnnnnnnnnnnnnnnnnnnnnnnnnnnnnnnnnnnnnnnnnnnnnnnnnnnnnnnnnnnnnnnnnnnnnnnnnnnnnnnnnnnnnnnnnnnnnnnnnnnnnnnnnnnnnnnnnnnnnnnnnnnnnnnnnnnnnnnnnnnnnnnnnnnnnnnnnnnnnnnnnnnnnnnnnnnnnnnnnnnnnnnnnnnnnnnnnnnnnnnnnnnnnnnnnnnnnnnnnnnnnnnnnnnnnnnnnnnnnnnnnnnnnnnnnnnnnnnnnnnnnnnnnnnnnnnnnnnnnnnnnnnnnnnnnnnnnnnnnnnnnnnnnnnnnnnnnnnnnnnnnnnnnnnnnnnnnnnnnnnnnnnnnnnnnnnnnnnnnnnnnnnnnnnnnnnnnnnnnnnnnnnnnnnnnnnnnnnnnnnnnnnnnnnnnnnnnnnnnnnnnnnnnnnnnnnnnnnnnnnnnnnnnnnnnnnnnnnnnnnnnnnnnnnnnnnnnnnnnnnnnnnnnnnnnnnnnnnnnnnnnnnnnnnnnnnnnnnnnnnnnnnnnnnnnnnnnnnnnnnnnnnnnnnnnnnnnnnnnnnnnnnnnnnnnnnnnnnnnnnnnnnnnnnnnnnnnnnnnnnnnnnnnnnnnnnnnnnnnnnnnnnnnnnnnnnnnnnnnnnnnnnnnnnnnnnnnnnnnnnnnnnnnnnnnnnnnnnnnnnnnnnnnnnnnnnnnnnnnnnnnnnnnnnnnnnnnnnnnnnnnnnnnnnnnnnnnnnnnnnnnnnnnnnnnnnnnnnnnnnnnnnnnnnnnnnnnnnnnnnnnnnnnnnnnnnnnnnnnnnnnnnnnnnnnnnnnnnnnnnnnnnnnnnnnnnnnnnnnnnnnnnnnnnnnnnnnnnnnnnnnnnnnnnnnnnnnnnnnnnnnnnnnnnnnnnnnnnnnnnnnnnnnnnnnnnnnnnnnnnnnnnnnnnnnnnnnnnnnnnnnnnnnnnnnnnnnnnnnnnnnnnnnnnnnnnnnnnnnnnnnnnnnnnnnnnnnnnnnnnnnnnnnnnnnnnnnnnnnnnnnnnnnnnnnnnnnnnnnnnnnnnnnnnnnnnnnnnnnnnnnnnnnnnnnnnnnnnnnnnnnnnnnnnnnnnnnnnnnnnnnnnnnnnnnnnnnnnnnnnnnnnnnnnnnnnnnnnnnnnnnnnnnnnnnnnnnnnnnnnnnnnnnnnnnnnnnnnnnnnnnnnnnnnnnnnnnnnnnnnnnnnnnnnnnnnnnnnnnnnnnnnnnnnnnnnnnnnnnnnnnnnnnnnnnnnnnnnnnnnnnnnnnnnnnnnnnnnnnnnnnnnnnnnnnnnnnnnnnnnnnnnnnnnnnnnnnnnnnnnnnnnnnnnnnnnnnnnnnnnnnnnnnnnnnnnnnnnnnnnnnnnnnnnnnnnnnnnnnnnnnnnnnnnnnnnnnnnnnnnnnnnnnnnnnnnnnnnnnnnnnnnnnnnnnnnnnnnnnnnnnnnnnnnnnnnnnnnnnnnnnnnnnnnnnnnnnnnnnnnnnnnnnnnnnnnnnnnnnnnnnnnnnnnnnnnnnnnnnnnnnnnnnnnnnnnnnnnnnnnnnnnnnnnnnnnnnnnnnnnnnnnnnnnnnnnnnnnnnnnnnnnnnnnnnnnnnnnnnnnnnnnnnnnnnnnnnnnnnnnnnnnnnnnnnnnnnnnnnnnnnnnnnnnnnnnnnnnnnnnnnnnnnnnnnnnnnnnnnnnnnnnnnnnnnnnnnnnnnnnnnnnnnnnnnnnnnnnnnnnnnnnnnnnnnnnnnnnnnnnnnnnnnnnnnnnnnnnnnnnnnnnnnnnnnnnnnnnnnnnnnnnnnnnnnnnnnnnnnnnnnnnnnnnnnnnnnnnnnnnnnnnnnnnnnnnnnnnnnnnnnnnnnnnnnnnnnnnnnnnnnnnnnnnnnnnnnnnnnnnnnnnnnnnnnnnnnnnnnnnnnnnnnnnnnnnnnnnnnnnnnnnnnnnnnnnnnnnnnnnnnnnnnnnnnnnnnnnnnnnnnnnnnnnnnnnnnnnnnnnnnnnnnnnnnnnnnnnnnnnnnnnnnnnnnnnnnnnnnnnnnnnnnnnnnnnnnnnnnnnnnnnnnnnnnnnnnnnnnnnnnnnnnnnnnnnnnnnnnnnnnnnnnnnnnnnnnnnnnnnnnnnnnnnnnnnnnnnnnnnnnnnnnnnnnnnnnnnnnnnnnnnnnnnnnnnnnnnnnnnnnnnnnnnnnnnnnnnnnnnnnnnnnnnnnnnnnnnnnnnnnnnnnnnnnnnnnnnnnnnnnnnnnnnnnnnnnnnnnnnnnnnnnnnnnnnnnnnnnnnnnnnnnnnnnnnnnnnnnnnnnnnnnnnnnnnnnnnnnnnnnnnnnnnnnnnnnnnnnnnnnnnnnnnnnnnnnnnnnnnnnnnnnnnnnnnnnnnnnnnnnnnnnnnnnnnnnnnnnnnnnnnnnnnnnnnnnnnnnnnnnnnnnnnnnnnnnnnnnnnnnnnnnnnnnnnnnnnnnnnnnnnnnnnnnnnnnnnnnnnnnnnnnnnnnnnnnnnnnnnnnnnnnnnnnnnnnnnnnnnnnnnnnnnnnnnnnnnnnnnnnnnnnnnnnnnnnnnnnnnnnnnnnnnnnnnnnnnnnnnnnnnnnnnnnnnnnnnnnnnnnnnnnnnnnnnnnnnnnnnnnnnnnnnnnnnnnnnnnnnnnnnnnnnnnnnnnnnnnnnnnnnnnnnnnnnnnnnnnnnnnnnnnnnnnnnnnnnnnnnnnnnnnnnnnnnnnnnnnnnnnnnnnnnnnnnnnnnnnnnnnnnnnnnnnnnnnnnnnnnnnnnnnnnnnnnnnnnnnnnnnnnnnnnnnnnnnnnnnnnnnnnnnnnnnnnnnnnnnnnnnnnnnnnnnnnnnnnnnnnnnnnnnnnnnnnnnnnnnnnnnnnnnnnnnnnnnnnnnnnnnnnnnnnnnnnnnnnnnnnnnnnnnnnnnnnnnnnnnnnnnnnnnnnnnnnnnnnnnnnnnnnnnnnnnnnnnnnnnnnnnnnnnnnnnnnnnnnnnnnnnnnnnnnnnnnnnnnnnnnnnnnnnnnnnnnnnnnnnnnnnnnnnnnnnnnnnnnnnnnnnnnnnnnnnnnnnnnnnnnnnnnnnnnnnnnnnnnnnnnnnnnnnnnnnnnnnnnnnnnnnnnnnnnnnnnnnnnnnnnnnnnnnnnnnnnnnnnnnnnnnnnnnnnnnnnnnnnnnnnnnnnnnnnnnnnnnnnnnnnnnnnnnnnnnnnnnnnnnnnnnnnnnnnnnnnnnnnnnnnnnnnnnnnnnnnnnnnnnnnnnnnnnnnnnnnnnnnnnnnnnnnnnnnnnnnnnnnnnnnnnnnnnnnnnnnnnnnnnnnnnnnnnnnnnnnnnnnnnnnnnnnnnnnnnnnnnnnnnnnnnnnnnnnnnnnnnnnnnnnnnnnnnnnnnnnnnnnnnnnnnnnnnnnnnnnnnnnnnnnnnnnnnnnnnnnnnnnnnnnnnnnnnnnnnnnnnnnnnnnnnnnnnnnnnnnnnnnnnnnnnnnnnnnnnnnnnnnnnnnnnnnnnnnnnnnnnnnnnnnnnnnnnnnnnnnnnnnnnnnnnnnnnnnnnnnnnnnnnnnnnnnnnnnnnnnnnnnnnnnnnnnnnnnnnnnnnnnnnnnnnnnnnnnnnnnnnnnnnnnnnnnnnnnnnnnnnnnnnnnnnnnnnnnnnnnnnnnnnnnnnnnnnnnnnnnnnnnnnnnnnnnnnnnnnnnnnnnnnnnnnnnnnnnnnnnnnnnnnnnnnnnnnnnnnnnnnnnnnnnnnnnnnnnnnnnnnnnnnnnnnnnnnnnnnnnnnnnnnnnnnnnnnnnnnnnnnnnnnnnnnnnnnnnnnnnnnnnnnnnnnnnnnnnnnnnnnnnnnnnnnnnnnnnnnnnnnnnnnnnnnnnnnnnnnnnnnnnnnnnnnnnnnnnnnnnnnnnnnnnnnnnnnnnnnnnnnnnnnnnnnnnnnnnnnnnnnnnnnnnnnnnnnnnnnnnnnnnnnnnnnnnnnnnnnnnnnnnnnnnnnnnnnnnnnnnnnnnnnnnnnnnnnnnnnnnnnnnnnnnnnnnnnnnnnnnnnnnnnnnnnnnnnnnnnnnnnnnnnnnnnnnnnnnnnnnnnnnnnnnnnnnnnnnnnnnnnnnnnnnnnnnnnnnnnnnnnnnnnnnnnnnnnnnnnnnnnnnnnnnnnnnnnnnnnnnnnnnnnnnnnnnnnnnnnnnnnnnnnnnnnnnnnnnnnnnnnnnnnnnnnnnnnnnnnnnnnnnnnnnnnnnnnnnnnnnnnnnnnnnnnnnnnnnnnnnnnnnnnnnnnnnnnnnnnnnnnnnnnnnnnnnnnnnnnnnnnnnnnnnnnnnnnnnnnnnnnnnnnnnnnnnnnnnnnnnnnnnnnnnnnnnnnnnnnnnnnnnnnnnnnnnnnnnnnnnnnnnnnnnnnnnnnnnnnnnnnnnnnnnnnnnnnnnnnnnnnnnnnnnnnnnnnnnnnnnnnnnnnnnnnnnnnnnnnnnnnnnnnnnnnnnnnnnnnnnnnnnnnnnnnnnnnnnnnnnnnnnnnnnnnnnnnnnnnnnnnnnnnnnnnnnnnnnnnnnnnnnnnnnnnnnnnnnnnnnnnnnnnnnnnnnnnnnnnnnnnnnnnnnnnnnnnnnnnnnnnnnnnnnnnnnnnnnnnnnnnnnnnnnnnnnnnnnnnnnnnnnnnnnnnnnnnnnnnnnnnnnnnnnnnnnnnnnnnnnnnnnnnnnnnnnnnnnnnnnnnnnnnnnnnnnnnnnnnnnnnnnnnnnnnnnnnnnnnnnnnnnnnnnnnnnnnnnnnnnnnnnnnnnnnnnnnnnnnnnnnnnnnnnnnnnnnnnnnnnnnnnnnnnnnnnnnnnnnnnnnnnnnnnnnnnnnnnnnnnnnnnnnnnnnnnnnnnnnnnnnnnnnnnnnnnnnnnnnnnnnnnnnnnnnnnnnnnnnnnnnnnnnnnnnnnnnnnnnnnnnnnnnnnnnnnnnnnnnnnnnnnnnnnnnnnnnnnnnnnnnnnnnnnnnnnnnnnnnnnnnnnnnnnnnnnnnnnnnnnnnnnnnnnnnnnnnnnnnnnnnnnnnnnnnnnnnnnnnnnnnnnnnnnnnnnnnnnnnnnnnnnnnnnnnnnnnnnnnnnnnnnnnnnnnnnnnnnnnnnnnnnnnnnnnnnnnnnnnnnnnnnnnnnnnnnnnnnnnnnnnnnnnnnnnnnnnnnnnnnnnnnnnnnnnnnnnnnnnnnnnnnnnnnnnnnnnnnnnnnnnnnnnnnnnnnnnnnnnnnnnnnnnnnnnnnnnnnnnnnnnnnnnnnnnnnnnnnnnnnnnnnnnnnnnnnnnnnnnnnnnnnnnnnnnnnnnnnnnnnnnnnnnnnnnnnnnnnnnnnnnnnnnnnnnnnnnnnnnnnnnnnnnnnnnnnnnnnnnnnnnnnnnnnnnnnnnnnnnnnnnnnnnnnnnnnnnnnnnnnnnnnnnnnnnnnnnnnnnnnnnnnnnnnnnnnnnnnnnnnnnnnnnnnnnnnnnnnnnnnnnnnnnnnnnnnnnnnnnnnnnnnnnnnnnnnnnnnnnnnnnnnnnnnnnnnnnnnnnnnnnnnnnnnnnnnnnnnnnnnnnnnnnnnnnnnnnnnnnnnnnnnnnnnnnnnnnnnnnnnnnnnnnnnnnnnnnnnnnnnnnnnnnnnnnnnnnnnnnnnnnnnnnnnnnnnnnnnnnnnnnnnnnnnnnnnnnnnnnnnnnnnnnnnnnnnnnnnnnnnnnnnnnnnnnnnnnnnnnnnnnnnnnnnnnnnnnnnnnnnnnnnnnnnnnnnnnnnnnnnnnnnnnnnnnnnnnnnnnnnnnnnnnnnnnnnnnnnnnnnnnnnnnnnnnnnnnnnnnnnnnnnnnnnnnnnnnnnnnnnnnnnnnnnnnnnnnnnnnnnnnnnnnnnnnnnnnnnnnnnnnnnnnnnnnnnnnnnnnnnnnnnnnnnnnnnnnnnnnnnnnnnnnnnnnnnnnnnnnnnnnnnnnnnnnnnnnnnnnnnnnnnnnnnnnnnnnnnnnnnnnnnnnnnnnnnnnnnnnnnnnnnnnnnnnnnnnnnnnnnnnnnnnnnnnnnnnnnnnnnnnnnnnnnnnnnnnnnnnnnnnnnnnnnnnnnnnnnnnnnnnnnnnnnnnnnnnnnnnnnnnnnnnnnnnnnnnnnnnnnnnnnnnnnnnnnnnnnnnnnnnnnnnnnnnnnnnnnnnnnnnnnnnnnnnnnnnnnnnnnnnnnnnnnnnnnnnnnnnnnnnnnnnnnnnnnnnnnnnnnnnnnnnnnnnnnnnnnnnnnnnnnnnnnnnnnnnnnnnnnnnnnnnnnnnnnnnnnnnnnnnnnnnnnnnnnnnnnnnnnnnnnnnnnnnnnnnnnnnnnnnnnnnnnnnnnnnnnnnnnnnnnnnnnnnnnnnnnnnnnnnnnnnnnnnnnnnnnnnnnnnnnnnnnnnnnnnnnnnnnnnnnnnnnnnnnnnnnnnnnnnnnnnnnnnnnnnnnnnnnnnnnnnnnnnnnnnnnnnnnnnnnnnnnnnnnnnnnnnnnnnnnnnnnnnnnnnnnnnnnnnnnnnnnnnnnnnnnnnnnnnnnnnnnnnnnnnnnnnnnnnnnnnnnnnnnnnnnnnnnnnnnnnnnnnnnnnnnnnnnnnnnnnnnnnnnnnnnnnnnnnnnnnnnnnnnnnnnnnnnnnnnnnnnnnnnnnnnnnnnnnnnnnnnnnnnnnnnnnnnnnnnnnnnnnnnnnnnnnnnnnnnnnnnnnnnnnnnnnnnnnnnnnnnnnnnnnnnnnnnnnnnnnnnnnnnnnnnnnnnnnnnnnnnnnnnnnnnnnnnnnnnnnnnnnnnnnnnnnnnnnnnnnnnnnnnnnnnnnnnnnnnnnnnnnnnnnnnnnnnnnnnnnnnnnnnnnnnnnnnnnnnnnnnnnnnnnnnnnnnnnnnnnnnnnnnnnnnnnnnnnnnnnnnnnnnnnnnnnnnnnnnnnnnnnnnnnnnnnnnnnnnnnnnnnnnnnnnnnnnnnnnnnnnnnnnnnnnnnnnnnnnnnnnnnnnnnnnnnnnnnnnnnnnnnnnnnnnnnnnnnnnnnnnnnnnnnnnnnnnnnnnnnnnnnnnnnnnnnnnnnnnnnnnnnnnnnnnnnnnnnnnnnnnnnnnnnnnnnnnnnnnnnnnnnnnnnnnnnnnnnnnnnnnnnnnnnnnnnnnnnnnnnnnnnnnnnnnnnnnnnnnnnnnnnnnnnnnnnnnnnnnnnnnnnnnnnnnnnnnnnnnnnnnnnnnnnnnnnnnnnnnnnnnnnnnnnnnnnnnnnnnnnnnnnnnnnnnnnnnnnnnnnnnnnnnnnnnnnnnnnnnnnnnnnnnnnnnnnnnnnnnnnnnnnnnnnnnnnnnnnnnnnnnnnnnnnnnnnnnnnnnnnnnnnnnnnnnnnnnnnnnnnnnnnnnnnnnnnnnnnnnnnnnnnnnnnnnnnnnnnnnnnnnnnnnnnnnnnnnnnnnnnnnnnnnnnnnnnnnnnnnnnnnnnnnnnnnnnnnnnnnnnnnnnnnnnnnnnnnnnnnnnnnnnnnnnnnnnnnnnnnnnnnnnnnnnnnnnnnnnnnnnnnnnnnnnnnnnnnnnnnnnnnnnnnnnnnnnnnnnnnnnnnnnnnnnnnnnnnnnnnnnnnnnnnnnnnnnnnnnnnnnnnnnnnnnnnnnnnnnnnnnnnnnnnnnnnnnnnnnnnnnnnnnnnnnnnnnnnnnnnnnnnnnnnnnnnnnnnnnnnnnnnnnnnnnnnnnnnnnnnnnnnnnnnnnnnnnnnnnnnnnnnnnnnnnnnnnnnnnnnnnnnnnnnnnnnnnnnnnnnnnnnnnnnnnnnnnnnnnnnnnnnnnnnnnnnnnnnnnnnnnnnnnnnnnnnnnnnnnnnnnnnnnnnnnnnnnnnnnnnnnnnnnnnnnnnnnnnnnnnnnnnnnnnnnnnnnnnnnnnnnnnnnnnnnnnnnnnnnnnnnnnnnnnnnnnnnnnnnnnnnnnnnnnnnnnnnnnnnnnnnnnnnnnnnnnnnnnnnnnnnnnnnnnnnnnnnnnnnnnnnnnnnnnnnnnnnnnnnnnnnnnnnnnnnnnnnnnnnnnnnnnnnnnnnnnnnnnnnnnnnnnnnnnnnnnnnnnnnnnnnnnnnnnnnnnnnnnnnnnnnnnnnnnnnnnnnnnnnnnnnnnnnnnnnnnnnnnnnnnnnnnnnnnnnnnnnnnnnnnnnnnnnnnnnnnnnnnnnnnnnnnnnnnnnnnnnnnnnnnnnnnnnnnnnnnnnnnnnnnnnnnnnnnnnnnnnnnnnnnnnnnnnnnnnnnnnnnnnnnnnnnnnnnnnnnnnnnnnnnnnnnnnnnnnnnnnnnnnnnnnnnnnnnnnnnnnnnnnnnnnnnnnnnnnnnnnnnnnnnnnnnnnnnnnnnnnnnnnnnnnnnnnnnnnnnnnnnnnnnnnnnnnnnnnnnnnnnnnnnnnnnnnnnnnnnnnnnnnnnnnnnnnnnnnnnnnnnnnnnnnnnnnnnnnnnnnnnnnnnnnnnnnnnnnnnnnnnnnnnnnnnnnnnnnnnnnnnnnnnnnnnnnnnnnnnnnnnnnnnnnnnnnnnnnnnnnnnnnnnnnnnnnnnnnnnnnnnnnnnnnnnnnnnnnnnnnnnnnnnnnnnnnnnnnnnnnnnnnnnnnnnnnnnnnnnnnnnnnnnnnnnnnnnnnnnnnnnnnnnnnnnnnnnnnnnnnnnnnnnnnnnnnnnnnnnnnnnnnnnnnnnnnnnnnnnnnnnnnnnnnnnnnnnnnnnnnnnnnnnnnnnnnnnnnnnnnnnnnnnnnnnnnnnnnnnnnnnnnnnnnnnnnnnnnnnnnnnnnnnnnnnnnnnnnnnnnnnnnnnnnnnnnnnnnnnnnnnnnnnnnnnnnnnnnnnnnnnnnnnnnnnnnnnnnnnnnnnnnnnnnnnnnnnnnnnnnnnnnnnnnnnnnnnnnnnnnnnnnnnnnnnnnnnnnnnnnnnnnnnnnnnnnnnnnnnnnnnnnnnnnnnnnnnnnnnnnnnnnnnnnnnnnnnnnnnnnnnnnnnnnnnnnnnnnnnnnnnnnnnnnnnnnnnnnnnnnnnnnnnnnnnnnnnnnnnnnnnnnnnnnnnnnnnnnnnnnnnnnnnnnnnnnnnnnnnnnnnnnnnnnnnnnnnnnnnnnnnnnnnnnnnnnnnnnnnnnnnnnnnnnnnnnnnnnnnnnnnnnnnnnnnnnnnnnnnnnnnnnnnnnnnnnnnnnnnnnnnnnnnnnnnnnnnnnnnnnnnnnnnnnnnnnnnnnnnnnnnnnnnnnnnnnnnnnnnnnnnnnnnnnnnnnnnnnnnnnnnnnnnnnnnnnnnnnnnnnnnnnnnnnnnnnnnnnnnnnnnnnnnnnnnnnnnnnnnnnnnnnnnnnnnnnnnnnnnnnnnnnnnnnnnnnnnnnnnnnnnnnnnnnnnnnnnnnnnnnnnnnnnnnnnnnnnnnnnnnnnnnnnnnnnnnnnnnnnnnnnnnnnnnnnnnnnnnnnnnnnnnnnnnnnnnnnnnnnnnnnnnnnnnnnnnnnnnnnnnnnnnnnnnnnnnnnnnnnnnnnnnnnnnnnnnnnnnnnnnnnnnnnnnnnnnnnnnnnnnnnnnnnnnnnnnnnnnnnnnnnnnnnnnnnnnnnnnnnnnnnnnnnnnnnnnnnnnnnnnnnnnnnnnnnnnnnnnnnnnnnnnnnnnnnnnnnnnnnnnnnnnnnnnnnnnnnnnnnnnnnnnnnnnnnnnnnnnnnnnnnnnnnnnnnnnnnnnnnnnnnnnnnnnnnnnnnnnnnnnnnnnnnnnnnnnnnnnnnnnnnnnnnnnnnnnnnnnnnnnnnnnnnnnnnnnnnnnnnnnnnnnnnnnnnnnnnnnnnnnnnnnnnnnnnnnnnnnnnnnnnnnnnnnnnnnnnnnnnnnnnnnnnnnnnnnnnnnnnnnnnnnnnnnnnnnnnnnnnnnnnnnnnnnnnnnnnnnnnnnnnnnnnnnnnnnnnnnnnnnnnnnnnnnnnnnnnnnnnnnnnnnnnnnnnnnnnnnnnnnnnnnnnnnnnnnnnnnnnnnnnnnnnnnnnnnnnnnnnnnnnnnnnnnnnnnnnnnnnnnnnnnnnnnnnnnnnnnnnnnnnnnnnnnnnnnnnnnnnnnnnnnnnnnnnnnnnnnnnnnnnnnnnnnnnnnnnnnnnnnnnnnnnnnnnnnnnnnnnnnnnnnnnnnnnnnnnnnnnnnnnnnnnnnnnnnnnnnnnnnnnnnnnnnnnnnnnnnnnnnnnnnnnnnnnnnnnnnnnnnnnnnnnnnnnnnnnnnnnnnnnnnnnnnnnnnnnnnnnnnnnnnnnnnnnnnnnnnnnnnnnnnnnnnnnnnnnnnnnnnnnnnnnnnnnnnnnnnnnnnnnnnnnnnnnnnnnnnnnnnnnnnnnnnnnnnnnnnnnnnnnnnnnnnnnnnnnnnnnnnnnnnnnnnnnnnnnnnnnnnnnnnnnnnnnnnnnnnnnnnnnnnnnnnnnnnnnnnnnnnnnnnnnnnnnnnnnnnnnnnnnnnnnnnnnnnnnnnnnnnnnnnnnnnnnnnnnnnnnnnnnnnnnnnnnnnnnnnnnnnnnnnnnnnnnnnnnnnnnnnnnnnnnnnnnnnnnnnnnnnnnnnnnnnnnnnnnnnnnnnnnnnnnnnnnnnnnnnnnnnnnnnnnnnnnnnnnnnnnnnnnnnnnnnnnnnnnnnnnnnnnnnnnnnnnnnnnnnnnnnnnnnnnnnnnnnnnnnnnnnnnnnnnnnnnnnnnnnnnnnnnnnnnnnnnnnnnnnnnnnnnnnnnnnnnnnnnnnnnnnnnnnnnnnnnnnnnnnnnnnnnnnnnnnnnnnnnnnnnnnnnnnnnnnnnnnnnnnnnnnnnnnnnnnnnnnnnnnnnnnnnnnnnnnnnnnnnnnnnnnnnnnnnnnnnnnnnnnnnnnnnnnnnnnnnnnnnnnnnnnnnnnnnnnnnnnnnnnnnnnnnnnnnnnnnnnnnnnnnnnnnnnnnnnnnnnnnnnnnnnnnnnnnnnnnnnnnnnnnnnnnnnnnnnnnnnnnnnnnnnnnnnnnnnnnnnnnnnnnnnnnnnnnnnnnnnnnnnnnnnnnnnnnnnnnnnnnnnnnnnnnnnnnnnnnnnnnnnnnnnnnnnnnnnnnnnnnnnnnnnnnnnnnnnnnnnnnnnnnnnnnnnnnnnnnnnnnnnnnnnnnnnnnnnnnnnnnnnnnnnnnnnnnnnnnnnnnnnnnnnnnnnnnnnnnnnnnnnnnnnnnnnnnnnnnnnnnnnnnnnnnnnnnnnnnnnnnnnnnnnnnnnnnnnnnnnnnnnnnnnnnnnnnnnnnnnnnnnnnnnnnnnnnnnnnnnnnnnnnnnnnnnnnnnnnnnnnnnnnnnnnnnnnnnnnnnnnnnnnnnnnnnnnnnnnnnnnnnnnnnnnnnnnnnnnnnnnnnnnnnnnnnnnnnnnnnnnnnnnnnnnnnnnnnnnnnnnnnnnnnnnnnnnnnnnnnnnnnnnnnnnnnnnnnnnnnnnnnnnnnnnnnnnnnnnnnnnnnnnnnnnnnnnnnnnnnnnnnnnnnnnnnnnnnnnnnnnnnnnnnnnnnnnnnnnnnnnnnnnnnnnnnnnnnnnnnnnnnnnnnnnnnnnnnnnnnnnnnnnnnnnnnnnnnnnnnnnnnnnnnnnnnnnnnnnnnnnnnnnnnnnnnnnnnnnnnnnnnnnnnnnnnnnnnnnnnnnnnnnnnnnnnnnnnnnnnnnnnnnnnnnnnnnnnnnnnnnnnnnnnnnnnnnnnnnnnnnnnnnnnnnnnnnnnnnnnnnnnnnnnnnnnnnnnnnnnnnnnnnnnnnnnnnnnnnnnnnnnnnnnnnnnnnnnnnnnnnnnnnnnnnnnnnnnnnnnnnnnnnnnnnnnnnnnnnnnnnnnnnnnnnnnnnnnnnnnnnnnnnnnnnnnnnnnnnnnnnnnnnnnnnnnnnnnnnnnnnnnnnnnnnnnnnnnnnnnnnnnnnnnnnnnnnnnnnnnnnnnnnnnnnnnnnnnnnnnnnnnnnnnnnnnnnnnnnnnnnnnnnnnnnnnnnnnnnnnnnnnnnnnnnnnnnnnnnnnnnnnnnnnnnnnnnnnnnnnnnnnnnnnnnnnnnnnnnnnnnnnnnnnnnnnnnnnnnnnnnnnnnnnnnnnnnnnnnnnnnnnnnnnnnnnnnnnnnnnnnnnnnnnnnnnnnnnnnnnnnnnnnnnnnnnnnnnnnnnnnnnnnnnnnnnnnnnnnnnnnnnnnnnnnnnnnnnnnnnnnnnnnnnnnnnnnnnnnnnnnnnnnnnnnnnnnnnnnnnnnnnnnnnnnnnnnnnnnnnnnnnnnnnnnnnnnnnnnnnnnnnnnnnnnnnnnnnnnnnnnnnnnnnnnnnnnnnnnnnnnnnnnnnnnnnnnnnnnnnnnnnnnnnnnnnnnnnnnnnnnnnnnnnnnnnnnnnnnnnnnnnnnnnnnnnnnnnnnnnnnnnnnnnnnnnnnnnnnnnnnnnnnnnnnnnnnnnnnnnnnnnnnnnnnnnnnnnnnnnnnnnnnnnnnnnnnnnnnnnnnnnnnnnnnnnnnnnnnnnnnnnnnnnnnnnnnnnnnnnnnnnnnnnnnnnnnnnnnnnnnnnnnnnnnnnnnnnnnnnnnnnnnnnnnnnnnnnnnnnnnnnnnnnnnnnnnnnnnnnnnnnnnnnnnnnnnnnnnnnnnnnnnnnnnnnnnnnnnnnnnnnnnnnnnnnnnnnnnnnnnnnnnnnnnnnnnnnnnnnnnnnnnnnnnnnnnnnnnnnnnnnnnnnnnnnnnnnnnnnnnnnnnnnnnnnnnnnnnnnnnnnnnnnnnnnnnnnnnnnnnnnnnnnnnnnnnnnnnnnnnnnnnnnnnnnnnnnnnnnnnnnnnnnnnnnnnnnnnnnnnnnnnnnnnnnnnnnnnnnnnnnnnnnnnnnnnnnnnnnnnnnnnnnnnnnnnnnnnnnnnnnnnnnnnnnnnnnnnnnnnnnnnnnnnnnnnnnnnnnnnnnnnnnnnnnnnnnnnnnnnnnnnnnnnnnnnnnnnnnnnnnnnnnnnnnnnnnnnnnnnnnnnnnnnnnnnnnnnnnnnnnnnnnnnnnnnnnnnnnnnnnnnnnnnnnnnnnnnnnnnnnnnnnnnnnnnnnnnnnnnnnnnnnnnnnnnnnnnnnnnnnnnnnnnnnnnnnnnnnnnnnnnnnnnnnnnnnnnnnnnnnnnnnnnnnnnnnnnnnnnnnnnnnnnnnnnnnnnnnnnnnnnnnnnnnnnnnnnnnnnnnnnnnnnnnnnnnnnnnnnnnnnnnnnnnnnnnnnnnnnnnnnnnnnnnnnnnnnnnnnnnnnnnnnnnnnnnnnnnnnnnnnnnnnnnnnnnnnnnnnnnnnnnnnnnnnnnnnnnnnnnnnnnnnnnnnnnnnnnnnnnnnnnnnnnnnnnnnnnnnnnnnnnnnnnnnnnnnnnnnnnnnnnnnnnnnnnnnnnnnnnnnnnnnnnnnnnnnnnnnnnnnnnnnnnnnnnnnnnnnnnnnnnnnnnnnnnnnnnnnnnnnnnnnnnnnnnnnnnnnnnnnnnnnnnnnnnnnnnnnnnnnnnnnnnnnnnnnnnnnnnnnnnnnnnnnnnnnnnnnnnnnnnnnnnnnnnnnnnnnnnnnnnnnnnnnnnnnnnnnnnnnnnnnnnnnnnnnnnnnnnnnnnnnnnnnnnnnnnnnnnnnnnnnnnnnnnnnnnnnnnnnnnnnnnnnnnnnnnnnnnnnnnnnnnnnnnnnnnnnnnnnnnnnnnnnnnnnnnnnnnnnnnnnnnnnnnnnnnnnnnnnnnnnnnnnnnnnnnnnnnnnnnnnnnnnnnnnnnnnnnnnnnnnnnnnnnnnnnnnnnnnnnnnnnnnnnnnnnnnnnnnnnnnnnnnnnnnnnnnnnnnnnnnnnnnnnnnnnnnnnnnnnnnnnnnnnnnnnnnnnnnnnnnnnnnnnnnnnnnnnnnnnnnnnnnnnnnnnnnnnnnnnnnnnnnnnnnnnnnnnnnnnnnnnnnnnnnnnnnnnnnnnnnnnnnnnnnnnnnnnnnnnnnnnnnnnnnnnnnnnnnnnnnnnnnnnnnnnnnnnnnnnnnnnnnnnnnnnnnnnnnnnnnnnnnnnnnnnnnnnnnnnnnnnnnnnnnnnnnnnnnnnnnnnnnnnnnnnnnnnnnnnnnnnnnnnnnnnnnnnnnnnnnnnnnnnnnnnnnnnnnnnnnnnnnnnnnnnnnnnnnnnnnnnnnnnnnnnnnnnnnnnnnnnnnnnnnnnnnnnnnnnnnnnnnnnnnnnnnnnnnnnnnnnnnnnnnnnnnnnnnnnnnnnnnnnnnnnnnnnnnnnnnnnnnnnnnnnnnnnnnnnnnnnnnnnnnnnnnnnnnnnnnnnnnnnnnnnnnnnnnnnnnnnnnnnnnnnnnnnnnnnnnnnnnnnnnnnnnnnnnnnnnnnnnnnnnnnnnnnnnnnnnnnnnnnnnnnnnnnnnnnnnnnnnnnnnnnnnnnnnnnnnnnnnnnnnnnnnnnnnnnnnnnnnnnnnnnnnnnnnnnnnnnnnnnnnnnnnnnnnnnnnnnnnnnnnnnnnnnnnnnnnnnnnnnnnnnnnnnnnnnnnnnnnnnnnnnnnnnnnnnnnnnnnnnnnnnnnnnnnnnnnnnnnnnnnnnnnnnnnnnnnnnnnnnnnnnnnnnnnnnnnnnnnnnnnnnnnnnnnnnnnnnnnnnnnnnnnnnnnnnnnnnnnnnnnnnnnnnnnnnnnnnnnnnnnnnnnnnnnnnnnnnnnnnnnnnnnnnnnnnnnnnnnnnnnnnnnnnnnnnnnnnnnnnnnnnnnnnnnnnnnnnnnnnnnnnnnnnnnnnnnnnnnnnnnnnnnnnnnnnnnnnnnnnnnnnnnnnnnnnnnnnnnnnnnnnnnnnnnnnnnnnnnnnnnnnnnnnnnnnnnnnnnnnnnnnnnnnnnnnnnnnnnnnnnnnnnnnnnnnnnnnnnnnnnnnnnnnnnnnnnnnnnnnnnnnnnnnnnnnnnnnnnnnnnnnnnnnnnnnnnnnnnnnnnnnnnnnnnnnnnnnnnnnnnnnnnnnnnnnnnnnnnnnnnnnnnnnnnnnnnnnnnnnnnnnnnnnnnnnnnnnnnnnnnnnnnnnnnnnnnnnnnnnnnnnnnnnnnnnnnnnnnnnnnnnnnnnnnnnnnnnnnnnnnnnnnnnnnnnnnnnnnnnnnnnnnnnnnnnnnnnnnnnnnnnnnnnnnnnnnnnnnnnnnnnnnnnnnnnnnnnnnnnnnnnnnnnnnnnnnnnnnnnnnnnnnnnnnnnnnnnnnnnnnnnnnnnnnnnnnnnnnnnnnnnnnnnnnnnnnnnnnnnnnnnnnnnnnnnnnnnnnnnnnnnnnnnnnnnnnnnnnnnnnnnnnnnnnnnnnnnnnnnnnnnnnnnnnnnnnnnnnnnnnnnnnnnnnnnnnnnnnnnnnnnnnnnnnnnnnnnnnnnnnnnnnnnnnnnnnnnnnnnnnnnnnnnnnnnnnnnnnnnnnnnnnnnnnnnnnnnnnnnnnnnnnnnnnnnnnnnnnnnnnnnnnnnnnnnnnnnnnnnnnnnnnnnnnnnnnnnnnnnnnnnnnnnnnnnnnnnnnnnnnnnnnnnnnnnnnnnnnnnnnnnnnnnnnnnnnnnnnnnnnnnnnnnnnnnnnnnnnnnnnnnnnnnnnnnnnnnnnnnnnnnnnnnnnnnnnnnnnnnnnnnnnnnnnnnnnnnnnnnnnnnnnnnnnnnnnnnnnnnnnnnnnnnnnnnnnnnnnnnnnnnnnnnnnnnnnnnnnnnnnnnnnnnnnnnnnnnnnnnnnnnnnnnnnnnnnnnnnnnnnnnnnnnnnnnnnnnnnnnnnnnnnnnnnnnnnnnnnnnnnnnnnnnnnnnnnnnnnnnnnnnnnnnnnnnnnnnnnnnnnnnnnnnnnnnnnnnnnnnnnnnnnnnnnnnnnnnnnnnnnnnnnnnnnnnnnnnnnnnnnnnnnnnnnnnnnnnnnnnnnnnnnnnnnnnnnnnnnnnnnnnnnnnnnnnnnnnnnnnnnnnnnnnnnnnnnnnnnnnnnnnnnnnnnnnnnnnnnnnnnnnnnnnnnnnnnnnnnnnnnnnnnnnnnnnnnnnnnnnnnnnnnnnnnnnnnnnnnnnnnnnnnnnnnnnnnnnnnnnnnnnnnnnnnnnnnnnnnnnnnnnnnnnnnnnnnnnnnnnnnnnnnnnnnnnnnnnnnnnnnnnnnnnnnnnnnnnnnnnnnnnnnnnnnnnnnnnnnnnnnnnnnnnnnnnnnnnnnnnnnnnnnnnnnnnnnnnnnnnnnnnnnnnnnnnnnnnnnnnnnnnnnnnnnnnnnnnnnnnnnnnnnnnnnnnnnnnnnnnnnnnnnnnnnnnnnnnnnnnnnnnnnnnnnnnnnnnnnnnnnnnnnnnnnnnnnnnnnnnnnnnnnnnnnnnnnnnnnnnnnnnnnnnnnnnnnnnnnnnnnnnnnnnnnnnnnnnnnnnnnnnnnnnnnnnnnnnnnnnnnnnnnnnnnnnnnnnnnnnnnnnnnnnnnnnnnnnnnnnnnnnnnnnnnnnnnnnnnnnnnnnnnnnnnnnnnnnnnnnnnnnnnnnnnnnnnnnnnnnnnnnnnnnnnnnnnnnnnnnnnnnnnnnnnnnnnnnnnnnnnnnnnnnnnnnnnnnnnnnnnnnnnnnnnnnnnnnnnnnnnnnnnnnnnnnnnnnnnnnnnnnnnnnnnnnnnnnnnnnnnnnnnnnnnnnnnnnnnnnnnnnnnnnnnnnnnnnnnnnnnnnnnnnnnnnnnnnnnnnnnnnnnnnnnnnnnnnnnnnnnnnnnnnnnnnnnnnnnnnnnnnnnnnnnnnnnnnnnnnnnnnnnnnnnnnnnnnnnnnnnnnnnnnnnnnnnnnnnnnnnnnnnnnnnnnnnnnnnnnnnnnnnnnnnnnnnnnnnnnnnnnnnnnnnnnnnnnnnnnnnnnnnnnnnnnnnnnnnnnnnnnnnnnnnnnnnnnnnnnnnnnnnnnnnnnnnnnnnnnnnnnnnnnnnnnnnnnnnnnnnnnnnnnnnnnnnnnnnnnnnnnnnnnnnnnnnnnnnnnnnnnnnnnnnnnnnnnnnnnnnnnnnnnnnnnnnnnnnnnnnnnnnnnnnnnnnnnnnnnnnnnnnnnnnnnnnnnnnnnnnnnnnnnnnnnnnnnnnnnnnnnnnnnnnnnnnnnnnnnnnnnnnnnnnnnnnnnnnnnnnnnnnnnnnnnnnnnnnnnnnnnnnnnnnnnnnnnnnnnnnnnnnnnnnnnnnnnnnnnnnnnnnnnnnnnnnnnnnnnnnnnnnnnnnnnnnnnnnnnnnnnnnnnnnnnnnnnnnnnnnnnnnnnnnnnnnnnnnnnnnnnnnnnnnnnnnnnnnnnnnnnnnnnnnnnnnnnnnnnnnnnnnnnnnnnnnnnnnnnnnnnnnnnnnnnnnnnnnnnnnnnnnnnnnnnnnnnnnnnnnnnnnnnnnnnnnnnnnnnnnnnnnnnnnnnnnnnnnnnnnnnnnnnnnnnnnnnnnnnnnnnnnnnnnnnnnnnnnnnnnnnnnnnnnnnnnnnnnnnnnnnnnnnnnnnnnnnnnnnnnnnnnnnnnnnnnnnnnnnnnnnnnnnnnnnnnnnnnnnnnnnnnnnnnnnnnnnnnnnnnnnnnnnnnnnnnnnnnnnnnnnnnnnnnnnnnnnnnnnnnnnnnnnnnnnnnnnnnnnnnnnnnnnnnnnnnnnnnnnnnnnnnnnnnnnnnnnnnnnnnnnnnnnnnnnnnnnnnnnnnnnnnnnnnnnnnnnnnnnnnnnnnnnnnnnnnnnnnnnnnnnnnnnnnnnnnnnnnnnnnnnnnnnnnnnnnnnnnnnnnnnnnnnnnnnnnnnnnnnnnnnnnnnnnnnnnnnnnnnnnnnnnnnnnnnnnnnnnnnnnnnnnnnnnnnnnnnnnnnnnnnnnnnnnnnnnnnnnnnnnnnnnnnnnnnnnnnnnnnnnnnnnnnnnnnnnnnnnnnnnnnnnnnnnnnnnnnnnnnnnnnnnnnnnnnnnnnnnnnnnnnnnnnnnnnnnnnnnnnnnnnnnnnnnnnnnnnnnnnnnnnnnnnnnnnnnnnnnnnnnnnnnnnnnnnnnnnnnnnnnnnnnnnnnnnnnnnnnnnnnnnnnnnnnnnnnnnnnnnnnnnnnnnnnnnnnnnnnnnnnnnnnnnnnnnnnnnnnnnnnnnnnnnnnnnnnnnnnnnnnnnnnnnnnnnnnnnnnnnnnnnnnnnnnnnnnnnnnnnnnnnnnnnnnnnnnnnnnnnnnnnnnnnnnnnnnnnnnnnnnnnnnnnnnnnnnnnnnnnnnnnnnnnnnnnnnnnnnnnnnnnnnnnnnnnnnnnnnnnnnnnnnnnnnnnnnnnnnnnnnnnnnnnnnnnnnnnnnnnnnnnnnnnnnnnnnnnnnnnnnnnnnnnnnnnnnnnnnnnnnnnnnnnnnnnnnnnnnnnnnnnnnnnnnnnnnnnnnnnnnnnnnnnnnnnnnnnnnnnnnnnnnnnnnnnnnnnnnnnnnnnnnnnnnnnnnnnnnnnnnnnnnnnnnnnnnnnnnnnnnnnnnnnnnnnnnnnnnnnnnnnnnnnnnnnnnnnnnnnnnnnnnnnnnnnnnnnnnnnnnnnnnnnnnnnnnnnnnnnnnnnnnnnnnnnnnnnnnnnnnnnnnnnnnnnnnnnnnnnnnnnnnnnnnnnnnnnnnnnnnnnnnnnnnnnnnnnnnnnnnnnnnnnnnnnnnnnnnnnnnnnnnnnnnnnnnnnnnnnnnnnnnnnnnnnnnnnnnnnnnnnnnnnnnnnnnnnnnnnnnnnnnnnnnnnnnnnnnnnnnnnnnnnnnnnnnnnnnnnnnnnnnnnnnnnnnnnnnnnnnnnnnnnnnnnnnnnnnnnnnnnnnnnnnnnnnnnnnnnnnnnnnnnnnnnnnnnnnnnnnnnnnnnnnnnnnnnnnnnnnnnnnnnnnnnnnnnnnnnnnnnnnnnnnnnnnnnnnnnnnnnnnnnnnnnnnnnnnnnnnnnnnnnnnnnnnnnnnnnnnnnnnnnnnnnnnnnnnnnnnnnnnnnnnnnnnnnnnnnnnnnnnnnnnnnnnnnnnnnnnnnnnnnnnnnnnnnnnnnnnnnnnnnnnnnnnnnnnnnnnnnnnnnnnnnnnnnnnnnnnnnnnnnnnnnnnnnnnnnnnnnnnnnnnnnnnnnnnnnnnnnnnnnnnnnnnnnnnnnnnnnnnnnnnnnnnnnnnnnnnnnnnnnnnnnnnnnnnnnnnnnnnnnnnnnnnnnnnnnnnnnnnnnnnnnnnnnnnnnnnnnnnnnnnnnnnnnnnnnnnnnnnnnnnnnnnnnnnnnnnnnnnnnnnnnnnnnnnnnnnnnnnnnnnnnnnnnnnnnnnnnnnnnnnnnnnnnnnnnnnnnnnnnnnnnnnnnnnnnnnnnnnnnnnnnnnnnnnnnnnnnnnnnnnnnnnnnnnnnnnnnnnnnnnnnnnnnnnnnnnnnnnnnnnnnnnnnnnnnnnnnnnnnnnnnnnnnnnnnnnnnnnnnnnnnnnnnnnnnnnnnnnnnnnnnnnnnnnnnnnnnnnnnnnnnnnnnnnnnnnnnnnnnnnnnnnnnnnnnnnnnnnnnnnnnnnnnnnnnnnnnnnnnnnnnnnnnnnnnnnnnnnnnnnnnnnnnnnnnnnnnnnnnnnnnnnnnnnnnnnnnnnnnnnnnnnnnnnnnnnnnnnnnnnnnnnnnnnnnnnnnnnnnnnnnnnnnnnnnnnnnnnnnnnnnnnnnnnnnnnnnnnnnnnnnnnnnnnnnnnnnnnnnnnnnnnnnnnnnnnnnnnnnnnnnnnnnnnnnnnnnnnnnnnnnnnnnnnnnnnnnnnnnnnnnnnnnnnnnnnnnnnnnnnnnnnnnnnnnnnnnnnnnnnnnnnnnnnnnnnnnnnnnnnnnnnnnnnnnnnnnnnnnnnnnnnnnnnnnnnnnnnnnnnnnnnnnnnnnnnnnnnnnnnnnnnnnnnnnnnnnnnnnnnnnnnnnnnnnnnnnnnnnnnnnnnnnnnnnnnnnnnnnnnnnnnnnnnnnnnnnnnnnnnnnnnnnnnnnnnnnnnnnnnnnnnnnnnnnnnnnnnnnnnnnnnnnnnnnnnnnnnnnnnnnnnnnnnnnnnnnnnnnnnnnnnnnnnnnnnnnnnnnnnnnnnnnnnnnnnnnnnnnnnnnnnnnnnnnnnnnnnnnnnnnnnnnnnnnnnnnnnnnnnnnnnnnnnnnnnnnnnnnnnnnnnnnnnnnnnnnnnnnnnnnnnnnnnnnnnnnnnnnnnnnnnnnnnnnnnnnnnnnnnnnnnnnnnnnnnnnnnnnnnnnnnnnnnnnnnnnnnnnnnnnnnnnnnnnnnnnnnnnnnnnnnnnnnnnnnnnnnnnnnnnnnnnnnnnnnnnnnnnnnnnnnnnnnnnnnnnnnnnnnnnnnnnnnnnnnnnnnnnnnnnnnnnnnnnnnnnnnnnnnnnnnnnnnnnnnnnnnnnnnnnnnnnnnnnnnnnnnnnnnnnnnnnnnnnnnnnnnnnnnnnnnnnnnnnnnnnnnnnnnnnnnnnnnnnnnnnnnnnnnnnnnnnnnnnnnnnnnnnnnnnnnnnnnnnnnnnnnnnnnnnnnnnnnnnnnnnnnnnnnnnnnnnnnnnnnnnnnnnnnnnnnnnnnnnnnnnnnnnnnnnnnnnnnnnnnnnnnnnnnnnnnnnnnnnnnnnnnnnnnnnnnnnnnnnnnnnnnnnnnnnnnnnnnnnnnnnnnnnnnnnnnnnnnnnnnnnnnnnnnnnnnnnnnnnnnnnnnnnnnnnnnnnnnnnnnnnnnnnnnnnnnnnnnnnnnnnnnnnnnnnnnnnnnnnnnnnnnnnnnnnnnnnnnnnnnnnnnnnnnnnnnnnnnnnnnnnnnnnnnnnnnnnnnnnnnnnnnnnnnnnnnnnnnnnnnnnnnnnnnnnnnnnnnnnnnnnnnnnnnnnnnnnnnnnnnnnnnnnnnnnnnnnnnnnnnnnnnnnnnnnnnnnnnnnnnnnnnnnnnnnnnnnnnnnnnnnnnnnnnnnnnnnnnnnnnnnnnnnnnnnnnnnnnnnnnnnnnnnnnnnnnnnnnnnnnnnnnnnnnnnnnnnnnnnnnnnnnnnnnnnnnnnnnnnnnnnnnnnnnnnnnnnnnnnnnnnnnnnnnnnnnnnnnnnnnnnnnnnnnnnnnnnnnnnnnnnnnnnnnnnnnnnnnnnnnnnnnnnnnnnnnnnnnnnnnnnnnnnnnnnnnnnnnnnnnnnnnnnnnnnnnnnnnnnnnnnnnnnnnnnnnnnnnnnnnnnnnnnnnnnnnnnnnnnnnnnnnnnnnnnnnnnnnnnnnnnnnnnnnnnnnnnnnnnnnnnnnnnnnnnnnnnnnnnnnnnnnnnnnnnnnnnnnnnnnnnnnnnnnnnnnnnnnnnnnnnnnnnnnnnnnnnnnnnnnnnnnnnnnnnnnnnnnnnnnnnnnnnnnnnnnnnnnnnnnnnnnnnnnnnnnnnnnnnnnnnnnnnnnnnnnnnnnnnnnnnnnnnnnnnnnnnnnnnnnnnnnnnnnnnnnnnnnnnnnnnnnnnnnnnnnnnnnnnnnnnnnnnnnnnnnnnnnnnnnnnnnnnnnnnnnnnnnnnnnnnnnnnnnnnnnnnnnnnnnnnnnnnnnnnnnnnnnnnnnnnnnnnnnnnnnnnnnnnnnnnnnnnnnnnnnnnnnnnnnnnnnnnnnnnnnnnnnnnnnnnnnnnnnnnnnnnnnnnnnnnnnnnnnnnnnnnnnnnnnnnnnnnnnnnnnnnnnnnnnnnnnnnnnnnnnnnnnnnnnnnnnnnnnnnnnnnnnnnnnnnnnnnnnnnnnnnnnnnnnnnnnnnnnnnnnnnnnnnnnnnnnnnnnnnnnnnnnnnnnnnnnnnnnnnnnnnnnnnnnnnnnnnnnnnnnnnnnnnnnnnnnnnnnnnnnnnnnnnnnnnnnnnnnnnnnnnnnnnnnnnnnnnnnnnnnnnnnnnnnnnnnnnnnnnnnnnnnnnnnnnnnnnnnnnnnnnnnnnnnnnnnnnnnnnnnnnnnnnnnnnnnnnnnnnnnnnnnnnnnnnnnnnnnnnnnnnnnnnnnnnnnnnnnnnnnnnnnnnnnnnnnnnnnnnnnnnnnnnnnnnnnnnnnnnnnnnnnnnnnnnnnnnnnnnnnnnnnnnnnnnnnnnnnnnnnnnnnnnnnnnnnnnnnnnnnnnnnnnnnnnnnnnnnnnnnnnnnnnnnnnnnnnnnnnnnnnnnnnnnnnnnnnnnnnnnnnnnnnnnnnnnnnnnnnnnnnnnnnnnnnnnnnnnnnnnnnnnnnnnnnnnnnnnnnnnnnnnnnnnnnnnnnnnnnnnnnnnnnnnnnnnnnnnnnnnnnnnnnnnnnnnnnnnnnnnnnnnnnnnnnnnnnnnnnnnnnnnnnnnnnnnnnnnnnnnnnnnnnnnnnnnnnnnnnnnnnnnnnnnnnnnnnnnnnnnnnnnnnnnnnnnnnnnnnnnnnnnnnnnnnnnnnnnnnnnnnnnnnnnnnnnnnnnnnnnnnnnnnnnnnnnnnnnnnnnnnnnnnnnnnnnnnnnnnnnnnnnnnnnnnnnnnnnnnnnnnnnnnnnnnnnnnnnnnnnnnnnnnnnnnnnnnnnnnnnnnnnnnnnnnnnnnnnnnnnnnnnnnnnnnnnnnnnnnnnnnnnnnnnnnnnnnnnnnnnnnnnnnnnnnnnnnnnnnnnnnnnnnnnnnnnnnnnnnnnnnnnnnnnnnnnnnnnnnnnnnnnnnnnnnnnnnnnnnnnnnnnnnnnnnnnnnnnnnnnnnnnnnnnnnnnnnnnnnnnnnnnnnnnnnnnnnnnnnnnnnnnnnnnnnnnnnnnnnnnnnnnnnnnnnnnnnnnnnnnnnnnnnnnnnnnnnnnnnnnnnnnnnnnnnnnnnnnnnnnnnnnnnnnnnnnnnnnnnnnnnnnnnnnnnnnnnnnnnnnnnnnnnnnnnnnnnnnnnnnnnnnnnnnnnnnnnnnnnnnnnnnnnnnnnnnnnnnnnnnnnnnnnnnnnnnnnnnnnnnnnnnnnnnnnnnnnnnnnnnnnnnnnnnnnnnnnnnnnnnnnnnnnnnnnnnnnnnnnnnnnnnnnnnnnnnnnnnnnnnnnnnnnnnnnnnnnnnnnnnnnnnnnnnnnnnnnnnnnnnnnnnnnnnnnnnnnnnnnnnnnnnnnnnnnnnnnnnnnnnnnnnnnnnnnnnnnnnnnnnnnnnnnnnnnnnnnnnnnnnnnnnnnnnnnnnnnnnnnnnnnnnnnnnnnnnnnnnnnnnnnnnnnnnnnnnnnnnnnnnnnnnnnnnnnnnnnnnnnnnnnnnnnnnnnnnnnnnnnnnnnnnnnnnnnnnnnnnnnnnnnnnnnnnnnnnnnnnnnnnnnnnnnnnnnnnnnnnnnnnnnnnnnnnnnnnnnnnnnnnnnnnnnnnnnnnnnnnnnnnnnnnnnnnnnnnnnnnnnnnnnnnnnnnnnnnnnnnnnnnnnnnnnnnnnnnnnnnnnnnnnnnnnnnnnnnnnnnnnnnnnnnnnnnnnnnnnnnnnnnnnnnnnnnnnnnnnnnnnnnnnnnnnnnnnnnnnnnnnnnnnnnnnnnnnnnnnnnnnnnnnnnnnnnnnnnnnnnnnnnnnnnnnnnnnnnnnnnnnnnnnnnnnnnnnnnnnnnnnnnnnnnnnnnnnnnnnnnnnnnnnnnnnnnnnnnnnnnnnnnnnnnnnnnnnnnnnnnnnnnnnnnnnnnnnnnnnnnnnnnnnnnnnnnnnnnnnnnnnnnnnnnnnnnnnnnnnnnnnnnnnnnnnnnnnnnnnnnnnnnnnnnnnnnnnnnnnnnnnnnnnnnnnnnnnnnnnnnnnnnnnnnnnnnnnnnnnnnnnnnnnnnnnnnnnnnnnnnnnnnnnnnnnnnnnnnnnnnnnnnnnnnnnnnnnnnnnnnnnnnnnnnnnnnnnnnnnnnnnnnnnnnnnnnnnnnnnnnnnnnnnnnnnnnnnnnnnnnnnnnnnnnnnnnnnnnnnnnnnnnnnnnnnnnnnnnnnnnnnnnnnnnnnnnnnnnnnnnnnnnnnnnnnnnnnnnnnnnnnnnnnnnnnnnnnnnnnnnnnnnnnnnnnnnnnnnnnnnnnnnnnnnnnnnnnnnnnnnnnnnnnnnnnnnnnnnnnnnnnnnnnnnnnnnnnnnnnnnnnnnnnnnnnnnnnnnnnnnnnnnnnnnnnnnnnnnnnnnnnnnnnnnnnnnnnnnnnnnnnnnnnnnnnnnnnnnnnnnnnnnnnnnnnnnnnnnnnnnnnnnnnnnnnnnnnnnnnnnnnnnnnnnnnnnnnnnnnnnnnnnnnnnnnnnnnnnnnnnnnnnnnnnnnnnnnnnnnnnnnnnnnnnnnnnnnnnnnnnnnnnnnnnnnnnnnnnnnnnnnnnnnnnnnnnnnnnnnnnnnnnnnnnnnnnnnnnnnnnnnnnnnnnnnnnnnnnnnnnnnnnnnnnnnnnnnnnnnnnnnnnnnnnnnnnnnnnnnnnnnnnnnnnnnnnnnnnnnnnnnnnnnnnnnnnnnnnnnnnnnnnnnnnnnnnnnnnnnnnnnnnnnnnnnnnnnnnnnnnnnnnnnnnnnnnnnnnnnnnnnnnnnnnnnnnnnnnnnnnnnnnnnnnnnnnnnnnnnnnnnnnnnnnnnnnnnnnnnnnnnnnnnnnnnnnnnnnnnnnnnnnnnnnnnnnnnnnnnnnnnnnnnnnnnnnnnnnnnnnnnnnnnnnnnnnnnnnnnnnnnnnnnnnnnnnnnnnnnnnnnnnnnnnnnnnnnnnnnnnnnnnnnnnnnnnnnnnnnnnnnnnnnnnnnnnnnnnnnnnnnnnnnnnnnnnnnnnnnnnnnnnnnnnnnnnnnnnnnnnnnnnnnnnnnnnnnnnnnnnnnnnnnnnnnnnnnnnnnnnnnnnnnnnnnnnnnnnnnnnnnnnnnnnnnnnnnnnnnnnnnnnnnnnnnnnnnnnnnnnnnnnnnnnnnnnnnnnnnnnnnnnnnnnnnnnnnnnnnnnnnnnnnnnnnnnnnnnnnnnnnnnnnnnnnnnnnnnnnnnnnnnnnnnnnnnnnnnnnnnnnnnnnnnnnnnnnnnnnnnnnnnnnnnnnnnnnnnnnnnnnnnnnnnnnnnnnnnnnnnnnnnnnnnnnnnnnnnnnnnnnnnnnnnnnnnnnnnnnnnnnnnnnnnnnnnnnnnnnnnnnnnnnnnnnnnnnnnnnnnnnnnnnnnnnnnnnnnnnnnnnnnnnnnnnnnnnnnnnnnnnnnnnnnnnnnnnnnnnnnnnnnnnnnnnnnnnnnnnnnnnnnnnnnnnnnnnnnnnnnnnnnnnnnnnnnnnnnnnnnnnnnnnnnnnnnnnnnnnnnnnnnnnnnnnnnnnnnnnnnnnnnnnnnnnnnnnnnnnnnnnnnnnnnnnnnnnnnnnnnnnnnnnnnnnnnnnnnnnnnnnnnnnnnnnnnnnnnnnnnnnnnnnnnnnnnnnnnnnnnnnnnnnnnnnnnnnnnnnnnnnnnnnnnnnnnnnnnnnnnnnnnnnnnnnnnnnnnnnnnnnnnnnnnnnnnnnnnnnnnnnnnnnnnnnnnnnnnnnnnnnnnnnnnnnnnnnnnnnnnnnnnnnnnnnnnnnnnnnnnnnnnnnnnnnnnnnnnnnnnnnnnnnnnnnnnnnnnnnnnnnnnnnnnnnnnnnnnnnnnnnnnnnnnnnnnnnnnnnnnnnnnnnnnnnnnnnnnnnnnnnnnnnnnnnnnnnnnnnnnnnnnnnnnnnnnnnnnnnnnnnnnnnnnnnnnnnnnnnnnnnnnnnnnnnnnnnnnnnnnnnnnnnnnnnnnnnnnnnnnnnnnnnnnnnnnnnnnnnnnnnnnnnnnnnnnnnnnnnnnnnnnnnnnnnnnnnnnnnnnnnnnnnnnnnnnnnnnnnnnnnnnnnnnnnnnnnnnnnnnnnnnnnnnnnnnnnnnnnnnnnnnnnnnnnnnnnnnnnnnnnnnnnnnnnnnnnnnnnnnnnnnnnnnnnnnnnnnnnnnnnnnnnnnnnnnnnnnnnnnnnnnnnnnnnnnnnnnnnnnnnnnnnnnnnnnnnnnnnnnnnnnnnnnnnnnnnnnnnnnnnnnnnnnnnnnnnnnnnnnnnnnnnnnnnnnnnnnnnnnnnnnnnnnnnnnnnnnnnnnnnnnnnnnnnnnnnnnnnnnnnnnnnnnnnnnnnnnnnnnnnnnnnnnnnnnnnnnnnnnnnnnnnnnnnnnnnnnnnnnnnnnnnnnnnnnnnnnnnnnnnnnnnnnnnnnnnnnnnnnnnnnnnnnnnnnnnnnnnnnnnnnnnnnnnnnnnnnnnnnnnnnnnnnnnnnnnnnnnnnnnnnnnnnnnnnnnnnnnnnnnnnnnnnnnnnnnnnnnnnnnnnnnnnnnnnnnnnnnnnnnnnnnnnnnnnnnnnnnnnnnnnnnnnnnnnnnnnnnnnnnnnnnnnnnnnnnnnnnnnnnnnnnnnnnnnnnnnnnnnnnnnnnnnnnnnnnnnnnnnnnnnnnnnnnnnnnnnnnnnnnnnnnnnnnnnnnnnnnnnnnnnnnnnnnnnnnnnnnnnnnnnnnnnnnnnnnnnnnnnnnnnnnnnnnnnnnnnnnnnnnnnnnnnnnnnnnnnnnnnnnnnnnnnnnnnnnnnnnnnnnnnnnnnnnnnnnnnnnnnnnnnnnnnnnnnnnnnnnnnnnnnnnnnnnnnnnnnnnnnnnnnnnnnnnnnnnnnnnnnnnnnnnnnnnnnnnnnnnnnnnnnnnnnnnnnnnnnnnnnnnnnnnnnnnnnnnnnnnnnnnnnnnnnnnnnnnnnnnnnnnnnnnnnnnnnnnnnnnnnnnnnnnnnnnnnnnnnnnnnnnnnnnnnnnnnnnnnnnnnnnnnnnnnnnnnnnnnnnnnnnnnnnnnnnnnnnnnnnnnnnnnnnnnnnnnnnnnnnnnnnnnnnnnnnnnnnnnnnnnnnnnnnnnnnnnnnnnnnnnnnnnnnnnnnnnnnnnnnnnnnnnnnnnnnnnnnnnnnnnnnnnnnnnnnnnnnnnnnnnnnnnnnnnnnnnnnnnnnnnnnnnnnnnnnnnnnnnnnnnnnnnnnnnnnnnnnnnnnnnnnnnnnnnnnnnnnnnnnnnnnnnnnnnnnnnnnnnnnnnnnnnnnnnnnnnnnnnnnnnnnnnnnnnnnnnnnnnnnnnnnnnnnnnnnnnnnnnnnnnnnnnnnnnnnnnnnnnnnnnnnnnnnnnnnnnnnnnnnnnnnnnnnnnnnnnnnnnnnnnnnnnnnnnnnnnnnnnnnnnnnnnnnnnnnnnnnnnnnnnnnnnnnnnnnnnnnnnnnnnnnnnnnnnnnnnnnnnnnnnnnnnnnnnnnnnnnnnnnnnnnnnnnnnnnnnnnnnnnnnnnnnnnnnnnnnnnnnnnnnnnnnnnnnnnnnnnnnnnnnnnnnnnnnnnnnnnnnnnnnnnnnnnnnnnnnnnnnnnnnnnnnnnnnnnnnnnnnnnnnnnnnnnnnnnnnnnnnnnnnnnnnnnnnnnnnnnnnnnnnnnnnnnnnnnnnnnnnnnnnnnnnnnnnnnnnnnnnnnnnnnnnnnnnnnnnnnnnnnnnnnnnnnnnnnnnnnnnnnnnnnnnnnnnnnnnnnnnnnnnnnnnnnnnnnnnnnnnnnnnnnnnnnnnnnnnnnnnnnnnnnnnnnnnnnnnnnnnnnnnnnnnnnnnnnnnnnnnnnnnnnnnnnnnnnnnnnnnnnnnnnnnnnnnnnnnnnnnnnnnnnnnnnnnnnnnnnnnnnnnnnnnnnnnnnnnnnnnnnnnnnnnnnnnnnnnnnnnnnnnnnnnnnnnnnnnnnnnnnnnnnnnnnnnnnnnnnnnnnnnnnnnnnnnnnnnnnnnnnnnnnnnnnnnnnnnnnnnnnnnnnnnnnnnnnnnnnnnnnnnnnnnnnnnnnnnnnnnnnnnnnnnnnnnnnnnnnnnnnnnnnnnnnnnnnnnnnnnnnnnnnnnnnnnnnnnnnnnnnnnnnnnnnnnnnnnnnnnnnnnnnnnnnnnnnnnnnnnnnnnnnnnnnnnnnnnnnnnnnnnnnnnnnnnnnnnnnnnnnnnnnnnnnnnnnnnnnnnnnnnnnnnnnnnnnnnnnnnnnnnnnnnnnnnnnnnnnnnnnnnnnnnnnnnnnnnnnnnnnnnnnnnnnnnnnnnnnnnnnnnnnnnnnnnnnnnnnnnnnnnnnnnnnnnnnnnnnnnnnnnnnnnnnnnnnnnnnnnnnnnnnnnnnnnnnnnnnnnnnnnnnnnnnnnnnnnnnnnnnnnnnnnnnnnnnnnnnnnnnnnnnnnnnnnnnnnnnnnnnnnnnnnnnnnnnnnnnnnnnnnnnnnnnnnnnnnnnnnnnnnnnnnnnnnnnnnnnnnnnnnnnnnnnnnnnnnnnnnnnnnnnnnnnnnnnnnnnnnnnnnnnnnnnnnnnnnnnnnnnnnnnnnnnnnnnnnnnnnnnnnnnnnnnnnnnnnnnnnnnnnnnnnnnnnnnnnnnnnnnnnnnnnnnnnnnnnnnnnnnnnnnnnnnnnnnnnnnnnnnnnnnnnnnnnnnnnnnnnnnnnnnnnnnnnnnnnnnnnnnnnnnnnnnnnnnnnnnnnnnnnnnnnnnnnnnnnnnnnnnnnnnnnnnnnnnnnnnnnnnnnnnnnnnnnnnnnnnnnnnnnnnnnnnnnnnnnnnnnnnnnnnnnnnnnnnnnnnnnnnnnnnnnnnnnnnnnnnnnnnnnnnnnnnnnnnnnnnnnnnnnnnnnnnnnnnnnnnnnnnnnnnnnnnnnnnnnnnnnnnnnnnnnnnnnnnnnnnnnnnnnnnnnnnnnnnnnnnnnnnnnnnnnnnnnnnnnnnnnnnnnnnnnnnnnnnnnnnnnnnnnnnnnnnnnnnnnnnnnnnnnnnnnnnnnnnnnnnnnnnnnnnnnnnnnnnnnnnnnnnnnnnnnnnnnnnnnnnnnnnnnnnnnnnnnnnnnnnnnnnnnnnnnnnnnnnnnnnnnnnnnnnnnnnnnnnnnnnnnnnnnnnnnnnnnnnnnnnnnnnnnnnnnnnnnnnnnnnnnnnnnnnnnnnnnnnnnnnnnnnnnnnnnnnnnnnnnnnnnnnnnnnnnnnnnnnnnnnnnnnnnnnnnnnnnnnnnnnnnnnnnnnnnnnnnnnnnnnnnnnnnnnnnnnnnnnnnnnnnnnnnnnnnnnnnnnnnnnnnnnnnnnnnnnnnnnnnnnnnnnnnnnnnnnnnnnnnnnnnnnnnnnnnnnnnnnnnnnnnnnnnnnnnnnnnnnnnnnnnnnnnnnnnnnnnnnnnnnnnnnnnnnnnnnnnnnnnnnnnnnnnnnnnnnnnnnnnnnnnnnnnnnnnnnnnnnnnnnnnnnnnnnnnnnnnnnnnnnnnnnnnnnnnnnnnnnnnnnnnnnnnnnnnnnnnnnnnnnnnnnnnnnnnnnnnnnnnnnnnnnnnnnnnnnnnnnnnnnnnnnnnnnnnnnnnnnnnnnnnnnnnnnnnnnnnnnnnnnnnnnnnnnnnnnnnnnnnnnnnnnnnnnnnnnnnnnnnnnnnnnnnnnnnnnnnnnnnnnnnnnnnnnnnnnnnnnnnnnnnnnnnnnnnnnnnnnnnnnnnnnnnnnnnnnnnnnnnnnnnnnnnnnnnnnnnnnnnnnnnnnnnnnnnnnnnnnnnnnnnnnnnnnnnnnnnnnnnnnnnnnnnnnnnnnnnnnnnnnnnnnnnnnnnnnnnnnnnnnnnnnnnnnnnnnnnnnnnnnnnnnnnnnnnnnnnnnnnnnnnnnnnnnnnnnnnnnnnnnnnnnnnnnnnnnnnnnnnnnnnnnnnnnnnnnnnnnnnnnnnnnnnnnnnnnnnnnnnnnnnnnnnnnnnnnnnnnnnnnnnnnnnnnnnnnnnnnnnnnnnnnnnnnnnnnnnnnnnnnnnnnnnnnnnnnnnnnnnnnnnnnnnnnnnnnnnnnnnnnnnnnnnnnnnnnnnnnnnnnnnnnnnnnnnnnnnnnnnnnnnnnnnnnnnnnnnnnnnnnnnnnnnnnnnnnnnnnnnnnnnnnnnnnnnnnnnnnnnnnnnnnnnnnnnnnnnnnnnnnnnnnnnnnnnnnnnnnnnnnnnnnnnnnnnnnnnnnnnnnnnnnnnnnnnnnnnnnnnnnnnnnnnnnnnnnnnnnnnnnnnnnnnnnnnnnnnnnnnnnnnnnnnnnnnnnnnnnnnnnnnnnnnnnnnnnnnnnnnnnnnnnnnnnnnnnnnnnnnnnnnnnnnnnnnnnnnnnnnnnnnnnnnnnnnnnnnnnnnnnnnnnnnnnnnnnnnnnnnnnnnnnnnnnnnnnnnnnnnnnnnnnnnnnnnnnnnnnnnnnnnnnnnnnnnnnnnnnnnnnnnnnnnnnnnnnnnnnnnnnnnnnnnnnnnnnnnnnnnnnnnnnnnnnnnnnnnnnnnnnnnnnnnnnnnnnnnnnnnnnnnnnnnnnnnnnnnnnnnnnnnnnnnnnnnnnnnnnnnnnnnnnnnnnnnnnnnnnnnnnnnnnnnnnnnnnnnnnnnnnnnnnnnnnnnnnnnnnnnnnnnnnnnnnnnnnnnnnnnnnnnnnnnnnnnnnnnnnnnnnnnnnnnnnnnnnnnnnnnnnnnnnnnnnnnnnnnnnnnnnnnnnnnnnnnnnnnnnnnnnnnnnnnnnnnnnnnnnnnnnnnnnnnnnnnnnnnnnnnnnnnnnnnnnnnnnnnnnnnnnnnnnnnnnnnnnnnnnnnnnnnnnnnnnnnnnnnnnnnnnnnnnnnnnnnnnnnnnnnnnnnnnnnnnnnnnnnnnnnnnnnnnnnnnnnnnnnnnnnnnnnnnnnnnnnnnnnnnnnnnnnnnnnnnnnnnnnnnnnnnnnnnnnnnnnnnnnnnnnnnnnnnnnnnnnnnnnnnnnnnnnnnnnnnnnnnnnnnnnnnnnnnnnnnnnnnnnnnnnnnnnnnnnnnnnnnnnnnnnnnnnnnnnnnnnnnnnnnnnnnnnnnnnnnnnnnnnnnnnnnnnnnnnnnnnnnnnnnnnnnnnnnnnnnnnnnnnnnnnnnnnnnnnnnnnnnnnnnnnnnnnnnnnnnnnnnnnnnnnnnnnnnnnnnnnnnnnnnnnnnnnnnnnnnnnnnnnnnnnnnnnnnnnnnnnnnnnnnnnnnnnnnnnnnnnnnnnnnnnnnnnnnnnnnnnnnnnnnnnnnnnnnnnnnnnnnnnnnnnnnnnnnnnnnnnnnnnnnnnnnnnnnnnnnnnnnnnnnnnnnnnnnnnnnnnnnnnnnnnnnnnnnnnnnnnnnnnnnnnnnnnnnnnnnnnnnnnnnnnnnnnnnnnnnnnnnnnnnnnnnnnnnnnnnnnnnnnnnnnnnnnnnnnnnnnnnnnnnnnnnnnnnnnnnnnnnnnnnnnnnnnnnnnnnnnnnnnnnnnnnnnnnnnnnnnnnnnnnnnnnnnnnnnnnnnnnnnnnnnnnnnnnnnnnnnnnnnnnnnnnnnnnnnnnnnnnnnnnnnnnnnnnnnnnnnnnnnnnnnnnnnnnnnnnnnnnnnnnnnnnnnnnnnnnnnnnnnnnnnnnnnnnnnnnnnnnnnnnnnnnnnnnnnnnnnnnnnnnnnnnnnnnnnnnnnnnnnnnnnnnnnnnnnnnnnnnnnnnnnnnnnnnnnnnnnnnnnnnnnnnnnnnnnnnnnnnnnnnnnnnnnnnnnnnnnnnnnnnnnnnnnnnnnnnnnnnnnnnnnnnnnnnnnnnnnnnnnnnnnnnnnnnnnnnnnnnnnnnnnnnnnnnnnnnnnnnnnnnnnnnnnnnnnnnnnnnnnnnnnnnnnnnnnnnnnnnnnnnnnnnnnnnnnnnnnnnnnnnnnnnnnnnnnnnnnnnnnnnnnnnnnnnnnnnnnnnnnnnnnnnnnnnnnnnnnnnnnnnnnnnnnnnnnnnnnnnnnnnnnnnnnnnnnnnnnnnnnnnnnnnnnnnnnnnnnnnnnnnnnnnnnnnnnnnnnnnnnnnnnnnnnnnnnnnnnnnnnnnnnnnnnnnnnnnnnnnnnnnnnnnnnnnnnnnnnnnnnnnnnnnnnnnnnnnnnnnnnnnnnnnnnnnnnnnnnnnnnnnnnnnnnnnnnnnnnnnnnnnnnnnnnnnnnnnnnnnnnnnnnnnnnnnnnnnnnnnnnnnnnnnnnnnnnnnnnnnnnnnnnnnnnnnnnnnnnnnnnnnnnnnnnnnnnnnnnnnnnnnnnnnnnnnnnnnnnnnnnnnnnnnnnnnnnnnnnnnnnnnnnnnnnnnnnnnnnnnnnnnnnnnnnnnnnnnnnnnnnnnnnnnnnnnnnnnnnnnnnnnnnnnnnnnnnnnnnnnnnnnnnnnnnnnnnnnnnnnnnnnnnnnnnnnnnnnnnnnnnnnnnnnnnnnnnnnnnnnnnnnnnnnnnnnnnnnnnnnnnnnnnnnnnnnnnnnnnnnnnnnnnnnnnnnnnnnnnnnnnnnnnnnnnnnnnnnnnnnnnnnnnnnnnnnnnnnnnnnnnnnnnnnnnnnnnnnnnnnnnnnnnnnnnnnnnnnnnnnnnnnnnnnnnnnnnnnnnnnnnnnnnnnnnnnnnnnnnnnnnnnnnnnnnnnnnnnnnnnnnnnnnnnnnnnnnnnnnnnnnnnnnnnnnnnnnnnnnnnnnnnnnnnnnnnnnnnnnnnnnnnnnnnnnnnnnnnnnnnnnnnnnnnnnnnnnnnnnnnnnnnnnnnnnnnnnnnnnnnnnnnnnnnnnnnnnnnnnnnnnnnnnnnnnnnnnnnnnnnnnnnnnnnnnnnnnnnnnnnnnnnnnnnnnnnnnnnnnnnnnnnnnnnnnnnnnnnnnnnnnnnnnnnnnnnnnnnnnnnnnnnnnnnnnnnnnnnnnnnnnnnnnnnnnnnnnnnnnnnnnnnnnnnnnnnnnnnnnnnnnnnnnnnnnnnnnnnnnnnnnnnnnnnnnnnnnnnnnnnnnnnnnnnnnnnnnnnnnnnnnnnnnnnnnnnnnnnnnnnnnnnnnnnnnnnnnnnnnnnnnnnnnnnnnnnnnnnnnnnnnnnnnnnnnnnnnnnnnnnnnnnnnnnnnnnnnnnnnnnnnnnnnnnnnnnnnnnnnnnnnnnnnnnnnnnnnnnnnnnnnnnnnnnnnnnnnnnnnnnnnnnnnnnnnnnnnnnnnnnnnnnnnnnnnnnnnnnnnnnnnnnnnnnnnnnnnnnnnnnnnnnnnnnnnnnnnnnnnnnnnnnnnnnnnnnnnnnnnnnnnnnnnnnnnnnnnnnnnnnnnnnnnnnnnnnnnnnnnnnnnnnnnnnnnnnnnnnnnnnnnnnnnnnnnnnnnnnnnnnnnnnnnnnnnnnnnnnnnnnnnnnnnnnnnnnnnnnnnnnnnnnnnnnnnnnnnnnnnnnnnnnnnnnnnnnnnnnnnnnnnnnnnnnnnnnnnnnnnnnnnnnnnnnnnnnnnnnnnnnnnnnnnnnnnnnnnnnnnnnnnnnnnnnnnnnnnnnnnnnnnnnnnnnnnnnnnnnnnnnnnnnnnnnnnnnnnnnnnnnnnnnnnnnnnnnnnnnnnnnnnnnnnnnnnnnnnnnnnnnnnnnnnnnnnnnnnnnnnnnnnnnnnnnnnnnnnnnnnnnnnnnnnnnnnnnnnnnnnnnnnnnnnnnnnnnnnnnnnnnnnnnnnnnnnnnnnnnnnnnnnnnnnnnnnnnnnnnnnnnnnnnnnnnnnnnnnnnnnnnnnnnnnnnnnnnnnnnnnnnnnnnnnnnnnnnnnnnnnnnnnnnnnnnnnnnnnnnnnnnnnnnnnnnnnnnnnnnnnnnnnnnnnnnnnnnnnnnnnnnnnnnnnnnnnnnnnnnnnnnnnnnnnnnnnnnnnnnnnnnnnnnnnnnnnnnnnnnnnnnnnnnnnnnnnnnnnnnnnnnnnnnnnnnnnnnnnnnnnnnnnnnnnnnnnnnnnnnnnnnnnnnnnnnnnnnnnnnnnnnnnnnnnnnnnnnnnnnnnnnnnnnnnnnnnnnnnnnnnnnnnnnnnnnnnnnnnnnnnnnnnnnnnnnnnnnnnnnnnnnnnnnnnnnnnnnnnnnnnnnnnnnnnnnnnnnnnnnnnnnnnnnnnnnnnnnnnnnnnnnnnnnnnnnnnnnnnnnnnnnnnnnnnnnnnnnnnnnnnnnnnnnnnnnnnnnnnnnnnnnnnnnnnnnnnnnnnnnnnnnnnnnnnnnnnnnnnnnnnnnnnnnnnnnnnnnnnnnnnnnnnnnnnnnnnnnnnnnnnnnnnnnnnnnnnnnnnnnnnnnnnnnnnnnnnnnnnnnnnnnnnnnnnnnnnnnnnnnnnnnnnnnnnnnnnnnnnnnnnnnnnnnnnnnnnnnnnnnnnnnnnnnnnnnnnnnnnnnnnnnnnnnnnnnnnnnnnnnnnnnnnnnnnnnnnnnnnnnnnnnnnnnnnnnnnnnnnnnnnnnnnnnnnnnnnnnnnnnnnnnnnnnnnnnnnnnnnnnnnnnnnnnnnnnnnnnnnnnnnnnnnnnnnnnnnnnnnnnnnnnnnnnnnnnnnnnnnnnnnnnnnnnnnnnnnnnnnnnnnnnnnnnnnnnnnnnnnnnnnnnnnnnnnnnnnnnnnnnnnnnnnnnnnnnnnnnnnnnnnnnnnnnnnnnnnnnnnnnnnnnnnnnnnnnnnnnnnnnnnnnnnnnnnnnnnnnnnnnnnnnnnnnnnnnnnnnnnnnnnnnnnnnnnnnnnnnnnnnnnnnnnnnnnnnnnnnnnnnnnnnnnnnnnnnnnnnnnnnnnnnnnnnnnnnnnnnnnnnnnnnnnnnnnnnnnnnnnnnnnnnnnnnnnnnnnnnnnnnnnnnnnnnnnnnnnnnnnnnnnnnnnnnnnnnnnnnnnnnnnnnnnnnnnnnnnnnnnnnnnnnnnnnnnnnnnnnnnnnnnnnnnnnnnnnnnnnnnnnnnnnnnnnnnnnnnnnnnnnnnnnnnnnnnnnnnnnnnnnnnnnnnnnnnnnnnnnnnnnnnnnnnnnnnnnnnnnnnnnnnnnnnnnnnnnnnnnnnnnnnnnnnnnnnnnnnnnnnnnnnnnnnnnnnnnnnnnnnnnnnnnnnnnnnnnnnnnnnnnnnnnnnnnnnnnnnnnnnnnnnnnnnnnnnnnnnnnnnnnnnnnnnnnnnnnnnnnnnnnnnnnnnnnnnnnnnnnnnnnnnnnnnnnnnnnnnnnnnnnnnnnnnnnnnnnnnnnnnnnnnnnnnnnnnnnnnnnnnnnnnnnnnnnnnnnnnnnnnnnnnnnnnnnnnnnnnnnnnnnnnnnnnnnnnnnnnnnnnnnnnnnnnnnnnnnnnnnnnnnnnnnnnnnnnnnnnnnnnnnnnnnnnnnnnnnnnnnnnnnnnnnnnnnnnnnnnnnnnnnnnnnnnnnnnnnnnnnnnnnnnnnnnnnnnnnnnnnnnnnnnnnnnnnnnnnnnnnnnnnnnnnnnnnnnnnnnnnnnnnnnnnnnnnnnnnnnnnnnnnnnnnnnnnnnnnnnnnnnnnnnnnnnnnnnnnnnnnnnnnnnnnnnnnnnnnnnnnnnnnnnnnnnnnnnnnnnnnnnnnnnnnnnnnnnnnnnnnnnnnnnnnnnnnnnnnnnnnnnnnnnnnnnnnnnnnnnnnnnnnnnnnnnnnnnnnnnnnnnnnnnnnnnnnnnnnnnnnnnnnnnnnnnnnnnnnnnnnnnnnnnnnnnnnnnnnnnnnnnnnnnnnnnnnnnnnnnnnnnnnnnnnnnnnnnnnnnnnnnnnnnnnnnnnnnnnnnnnnnnnnnnnnnnnnnnnnnnnnnnnnnnnnnnnnnnnnnnnnnnnnnnnnnnnnnnnnnnnnnnnnnnnnnnnnnnnnnnnnnnnnnnnnnnnnnnnnnnnnnnnnnnnnnnnnnnnnnnnnnnnnnnnnnnnnnnnnnnnnnnnnnnnnnnnnnnnnnnnnnnnnnnnnnnnnnnnnnnnnnnnnnnnnnnnnnnnnnnnnnnnnnnnnnnnnnnnnnnnnnnnnnnnnnnnnnnnnnnnnnnnnnnnnnnnnnnnnnnnnnnnnnnnnnnnnnnnnnnnnnnnnnnnnnnnnnnnnnnnnnnnnnnnnnnnnnnnnnnnnnnnnnnnnnnnnnnnnnnnnnnnnnnnnnnnnnnnnnnnnnnnnnnnnnnnnnnnnnnnnnnnnnnnnnnnnnnnnnnnnnnnnnnnnnnnnnnnnnnnnnnnnnnnnnnnnnnnnnnnnnnnnnnnnnnnnnnnnnnnnnnnnnnnnnnnnnnnnnnnnnnnnnnnnnnnnnnnnnnnnnnnnnnnnnnnnnnnnnnnnnnnnnnnnnnnnnnnnnnnnnnnnnnnnnnnnnnnnnnnnnnnnnnnnnnnnnnnnnnnnnnnnnnnnnnnnnnnnnnnnnnnnnnnnnnnnnnnnnnnnnnnnnnnnnnnnnnnnnnnnnnnnnnnnnnnnnnnnnnnnnnnnnnnnnnnnnnnnnnnnnnnnnnnnnnnnnnnnnnnnnnnnnnnnnnnnnnnnnnnnnnnnnnnnnnnnnnnnnnnnnnnnnnnnnnnnnnnnnnnnnnnnnnnnnnnnnnnnnnnnnnnnnnnnnnnnnnnnnnnnnnnnnnnnnnnnnnnnnnnnnnnnnnnnnnnnnnnnnnnnnnnnnnnnnnnnnnnnnnnnnnnnnnnnnnnnnnnnnnnnnnnnnnnnnnnnnnnnnnnnnnnnnnnnnnnnnnnnnnnnnnnnnnnnnnnnnnnnnnnnnnnnnnnnnnnnnnnnnnnnnnnnnnnnnnnnnnnnnnnnnnnnnnnnnnnnnnnnnnnnnnnnnnnnnnnnnnnnnnnnnnnnnnnnnnnnnnnnnnnnnnnnnnnnnnnnnnnnnnnnnnnnnnnnnnnnnnnnnnnnnnnnnnnnnnnnnnnnnnnnnnnnnnnnnnnnnnnnnnnnnnnnnnnnnnnnnnnnnnnnnnnnnnnnnnnnnnnnnnnnnnnnnnnnnnnnnnnnnnnnnnnnnnnnnnnnnnnnnnnnnnnnnnnnnnnnnnnnnnnnnnnnnnnnnnnnnnnnnnnnnnnnnnnnnnnnnnnnnnnnnnnnnnnnnnnnnnnnnnnnnnnnnnnnnnnnnnnnnnnnnnnnnnnnnnnnnnnnnnnnnnnnnnnnnnnnnnnnnnnnnnnnnnnnnnnnnnnnnnnnnnnnnnnnnnnnnnnnnnnnnnnnnnnnnnnnnnnnnnnnnnnnnnnnnnnnnnnnnnnnnnnnnnnnnnnnnnnnnnnnnnnnnnnnnnnnnnnnnnnnnnnnnnnnnnnnnnnnnnnnnnnnnnnnnnnnnnnnnnnnnnnnnnnnnnnnnnnnnnnnnnnnnnnnnnnnnnnnnnnnnnnnnnnnnnnnnnnnnnnnnnnnnnnnnnnnnnnnnnnnnnnnnnnnnnnnnnnnnnnnnnnnnnnnnnnnnnnnnnnnnnnnnnnnnnnnnnnnnnnnnnnnnnnnnnnnnnnnnnnnnnnnnnnnnnnnnnnnnnnnnnnnnnnnnnnnnnnnnnnnnnnnnnnnnnnnnnnnnnnnnnnnnnnnnnnnnnnnnnnnnnnnnnnnnnnnnnnnnnnnnnnnnnnnnnnnnnnnnnnnnnnnnnnnnnnnnnnnnnnnnnnnnnnnnnnnnnnnnnnnnnnnnnnnnnnnnnnnnnnnnnnnnnnnnnnnnnnnnnnnnnnnnnnnnnnnnnnnnnnnnnnnnnnnnnnnnnnnnnnnnnnnnnnnnnnnnnnnnnnnnnnnnnnnnnnnnnnnnnnnnnnnnnnnnnnnnnnnnnnnnnnnnnnnnnnnnnnnnnnnnnnnnnnnnnnnnnnnnnnnnnnnnnnnnnnnnnnnnnnnnnnnnnnnnnnnnnnnnnnnnnnnnnnnnnnnnnnnnnnnnnnnnnnnnnnnnnnnnnnnnnnnnnnnnnnnnnnnnnnnnnnnnnnnnnnnnnnnnnnnnnnnnnnnnnnnnnnnnnnnnnnnnnnnnnnnnnnnnnnnnnnnnnnnnnnnnnnnnnnnnnnnnnnnnnnnnnnnnnnnnnnnnnnnnnnnnnnnnnnnnnnnnnnnnnnnnnnnnnnnnnnnnnnnnnnnnnnnnnnnnnnnnnnnnnnnnnnnnnnnnnnnnnnnnnnnnnnnnnnnnnnnnnnnnnnnnnnnnnnnnnnnnnnnnnnnnnnnnnnnnnnnnnnnnnnnnnnnnnnnnnnnnnnnnnnnnnnnnnnnnnnnnnnnnnnnnnnnnnnnnnnnnnnnnnnnnnnnnnnnnnnnnnnnnnnnnnnnnnnnnnnnnnnnnnnnnnnnnnnnnnnnnnnnnnnnnnnnnnnnnnnnnnnnnnnnnnnnnnnnnnnnnnnnnnnnnnnnnnnnnnnnnnnnnnnnnnnnnnnnnnnnnnnnnnnnnnnnnnnnnnnnnnnnnnnnnnnnnnnnnnnnnnnnnnnnnnnnnnnnnnnnnnnnnnnnnnnnnnnnnnnnnnnnnnnnnnnnnnnnnnnnnnnnnnnnnnnnnnnnnnnnnnnnnnnnnnnnnnnnnnnnnnnnnnnnnnnnnnnnnnnnnnnnnnnnnnnnnnnnnnnnnnnnnnnnnnnnnnnnnnnnnnnnnnnnnnnnnnnnnnnnnnnnnnnnnnnnnnnnnnnnnnnnnnnnnnnnnnnnnnnnnnnnnnnnnnnnnnnnnnnnnnnnnnnnnnnnnnnnnnnnnnnnnnnnnnnnnnnnnnnnnnnnnnnnnnnnnnnnnnnnnnnnnnnnnnnnnnnnnnnnnnnnnnnnnnnnnnnnnnnnnnnnnnnnnnnnnnnnnnnnnnnnnnnnnnnnnnnnnnnnnnnnnnnnnnnnnnnnnnnnnnnnnnnnnnnnnnnnnnnnnnnnnnnnnnnnnnnnnnnnnnnnnnnnnnnnnnnnnnnnnnnnnnnnnnnnnnnnnnnnnnnnnnnnnnnnnnnnnnnnnnnnnnnnnnnnnnnnnnnnnnnnnnnnnnnnnnnnnnnnnnnnnnnnnnnnnnnnnnnnnnnnnnnnnnnnnnnnnnnnnnnnnnnnnnnnnnnnnnnnnnnnnnnnnnnnnnnnnnnnnnnnnnnnnnnnnnnnnnnnnnnnnnnnnnnnnnnnnnnnnnnnnnnnnnnnnnnnnnnnnnnnnnnnnnnnnnnnnnnnnnnnnnnnnnnnnnnnnnnnnnnnnnnnnnnnnnnnnnnnnnnnnnnnnnnnnnnnnnnnnnnnnnnnnnnnnnnnnnnnnnnnnnnnnnnnnnnnnnnnnnnnnnnnnnnnnnnnnnnnnnnnnnnnnnnnnnnnnnnnnnnnnnnnnnnnnnnnnnnnnnnnnnnnnnnnnnnnnnnnnnnnnnnnnnnnnnnnnnnnnnnnnnnnnnnnnnnnnnnnnnnnnnnnnnnnnnnnnnnnnnnnnnnnnnnnnnnnnnnnnnnnnnnnnnnnnnnnnnnnnnnnnnnnnnnnnnnnnnnnnnnnnnnnnnnnnnnnnnnnnnnnnnnnnnnnnnnnnnnnnnnnnnnnnnnnnnnnnnnnnnnnnnnnnnnnnnnnnnnnnnnnnnnnnnnnnnnnnnnnnnnnnnnnnnnnnnnnnnnnnnnnnnnnnnnnnnnnnnnnnnnnnnnnnnnnnnnnnnnnnnnnnnnnnnnnnnnnnnnnnnnnnnnnnnnnnnnnnnnnnnnnnnnnnnnnnnnnnnnnnnnnnnnnnnnnnnnnnnnnnnnnnnnnnnnnnnnnnnnnnnnnnnnnnnnnnnnnnnnnnnnnnnnnnnnnnnnnnnnnnnnnnnnnnnnnnnnnnnnnnnnnnnnnnnnnnnnnnnnnnnnnnnnnnnnnnnnnnnnnnnnnnnnnnnnnnnnnnnnnnnnnnnnnnnnnnnnnnnnnnnnnnnnnnnnnnnnnnnnnnnnnnnnnnnnnnnnnnnnnnnnnnnnnnnnnnnnnnnnnnnnnnnnnnnnnnnnnnnnnnnnnnnnnnnnnnnnnnnnnnnnnnnnnnnnnnnnnnnnnnnnnnnnnnnnnnnnnnnnnnnnnnnnnnnnnnnnnnnnnnnnnnnnnnnnnnnnnnnnnnnnnnnnnnnnnnnnnnnnnnnnnnnnnnnnnnnnnnnnnnnnnnnnnnnnnnnnnnnnnnnnnnnnnnnnnnnnnnnnnnnnnnnnnnnnnnnnnnnnnnnnnnnnnnnnnnnnnnnnnnnnnnnnnnnnnnnnnnnnnnnnnnnnnnnnnnnnnnnnnnnnnnnnnnnnnnnnnnnnnnnnnnnnnnnnnnnnnnnnnnnnnnnnnnnnnnnnnnnnnnnnnnnnnnnnnnnnnnnnnnnnnnnnnnnnnnnnnnnnnnnnnnnnnnnnnnnnnnnnnnnnnnnnnnnnnnnnnnnnnnnnnnnnnnnnnnnnnnnnnnnnnnnnnnnnnnnnnnnnnnnnnnnnnnnnnnnnnnnnnnnnnnnnnnnnnnnnnnnnnnnnnnnnnnnnnnnnnnnnnnnnnnnnnnnnnnnnnnnnnnnnnnnnnnnnnnnnnnnnnnnnnnnnnnnnnnnnnnnnnnnnnnnnnnnnnnnnnnnnnnnnnnnnnnnnnnnnnnnnnnnnnnnnnnnnnnnnnnnnnnnnnnnnnnnnnnnnnnnnnnnnnnnnnnnnnnnnnnnnnnnnnnnnnnnnnnnnnnnnnnnnnnnnnnnnnnnnnnnnnnnnnnnnnnnnnnnnnnnnnnnnnnnnnnnnnnnnnnnnnnnnnnnnnnnnnnnnnnnnnnnnnnnnnnnnnnnnnnnnnnnnnnnnnnnnnnnnnnnnnnnnnnnnnnnnnnnnnnnnnnnnnnnnnnnnnnnnnnnnnnnnnnnnnnnnnnnnnnnnnnnnnnnnnnnnnnnnnnnnnnnnnnnnnnnnnnnnnnnnnnnnnnnnnnnnnnnnnnnnnnnnnnnnnnnnnnnnnnnnnnnnnnnnnnnnnnnnnnnnnnnnnnnnnnnnnnnnnnnnnnnnnnnnnnnnnnnnnnnnnnnnnnnnnnnnnnnnnnnnnnnnnnnnnnnnnnnnnnnnnnnnnnnnnnnnnnnnnnnnnnnnnnnnnnnnnnnnnnnnnnnnnnnnnnnnnnnnnnnnnnnnnnnnnnnnnnnnnnnnnnnnnnnnnnnnnnnnnnnnnnnnnnnnnnnnnnnnnnnnnnnnnnnnnnnnnnnnnnnnnnnnnnnnnnnnnnnnnnnnnnnnnnnnnnnnnnnnnnnnnnnnnnnnnnnnnnnnnnnnnnnnnnnnnnnnnnnnnnnnnnnnnnnnnnnnnnnnnnnnnnnnnnnnnnnnnnnnnnnnnnnnnnnnnnnnnnnnnnnnnnnnnnnnnnnnnnnnnnnnnnnnnnnnnnnnnnnnnnnnnnnnnnnnnnnnnnnnnnnnnnnnnnnnnnnnnnnnnnnnnnnnnnnnnnnnnnnnnnnnnnnnnnnnnnnnnnnnnnnnnnnnnnnnnnnnnnnnnnnnnnnnnnnnnnnnnnnnnnnnnnnnnnnnnnnnnnnnnnnnnnnnnnnnnnnnnnnnnnnnnnnnnnnnnnnnnnnnnnnnnnnnnnnnnnnnnnnnnnnnnnnnnnnnnnnnnnnnnnnnnnnnnnnnnnnnnnnnnnnnnnnnnnnnnnnnnnnnnnnnnnnnnnnnnnnnnnnnnnnnnnnnnnnnnnnnnnnnnnnnnnnnnnnnnnnnnnnnnnnnnnnnnnnnnnnnnnnnnnnnnnnnnnnnnnnnnnnnnnnnnnnnnnnnnnnnnnnnnnnnnnnnnnnnnnnnnnnnnnnnnnnnnnnnnnnnnnnnnnnnnnnnnnnnnnnnnnnnnnnnnnnnnnnnnnnnnnnnnnnnnnnnnnnnnnnnnnnnnnnnnnnnnnnnnnnnnnnnnnnnnnnnnnnnnnnnnnnnnnnnnnnnnnnnnnnnnnnnnnnnnnnnnnnnnnnnnnnnnnnnnnnnnnnnnnnnnnnnnnnnnnnnnnnnnnnnnnnnnnnnnnnnnnnnnnnnnnnnnnnnnnnnnnnnnnnnnnnnnnnnnnnnnnnnnnnnnnnnnnnnnnnnnnnnnnnnnnnnnnnnnnnnnnnnnnnnnnnnnnnnnnnnnnnnnnnnnnnnnnnnnnnnnnnnnnnnnnnnnnnnnnnnnnnnnnnnnnnnnnnnnnnnnnnnnnnnnnnnnnnnnnnnnnnnnnnnnnnnnnnnnnnnnnnnnnnnnnnnnnnnnnnnnnnnnnnnnnnnnnnnnnnnnnnnnnnnnnnnnnnnnnnnnnnnnnnnnnnnnnnnnnnnnnnnnnnnnnnnnnnnnnnnnnnnnnnnnnnnnnnnnnnnnnnnnnnnnnnnnnnnnnnnnnnnnnnnnnnnnnnnnnnnnnnnnnnnnnnnnnnnnnnnnnnnnnnnnnnnnnnnnnnnnnnnnnnnnnnnnnnnnnnnnnnnnnnnnnnnnnnnnnnnnnnnnnnnnnnnnnnnnnnnnnnnnnnnnnnnnnnnnnnnnnnnnnnnnnnnnnnnnnnnnnnnnnnnnnnnnnnnnnnnnnnnnnnnnnnnnnnnnnnnnnnnnnnnnnnnnnnnnnnnnnnnnnnnnnnnnnnnnnnnnnnnnnnnnnnnnnnnnnnnnnnnnnnnnnnnnnnnnnnnnnnnnnnnnnnnnnnnnnnnnnnnnnnnnnnnnnnnnnnnnnnnnnnnnnnnnnnnnnnnnnnnnnnnnnnnnnnnnnnnnnnnnnnnnnnnnnnnnnnnnnnnnnnnnnnnnnnnnnnnnnnnnnnnnnnnnnnnnnnnnnnnnnnnnnnnnnnnnnnnnnnnnnnnnnnnnnnnnnnnnnnnnnnnnnnnnnnnnnnnnnnnnnnnnnnnnnnnnnnnnnnnnnnnnnnnnnnnnnnnnnnnnnnnnnnnnnnnnnnnnnnnnnnnnnnnnnnnnnnnnnnnnnnnnnnnnnnnnnnnnnnnnnnnnnnnnnnnnnnnnnnnnnnnnnnnnnnnnnnnnnnnnnnnnnnnnnnnnnnnnnnnnnnnnnnnnnnnnnnnnnnnnnnnnnnnnnnnnnnnnnnnnnnnnnnnnnnnnnnnnnnnnnnnnnnnnnnnnnnnnnnnnnnnnnnnnnnnnnnnnnnnnnnnnnnnnnnnnnnnnnnnnnnnnnnnnnnnnnnnnnnnnnnnnnnnnnnnnnnnnnnnnnnnnnnnnnnnnnnnnnnnnnnnnnnnnnnnnnnnnnnnnnnnnnnnnnnnnnnnnnnnnnnnnnnnnnnnnnnnnnnnnnnnnnnnnnnnnnnnnnnnnnnnnnnnnnnnnnnnnnnnnnnnnnnnnnnnnnnnnnnnnnnnnnnnnnnnnnnnnnnnnnnnnnnnnnnnnnnnnnnnnnnnnnnnnnnnnnnnnnnnnnnnnnnnnnnnnnnnnnnnnnnnnnnnnnnnnnnnnnnnnnnnnnnnnnnnnnnnnnnnnnnnnnnnnnnnnnnnnnnnnnnnnnnnnnnnnnnnnnnnnnnnnnnnnnnnnnnnnnnnnnnnnnnnnnnnnnnnnnnnnnnnnnnnnnnnnnnnnnnnnnnnnnnnnnnnnnnnnnnnnnnnnnnnnnnnnnnnnnnnnnnnnnnnnnnnnnnnnnnnnnnnnnnnnnnnnnnnnnnnnnnnnnnnnnnnnnnnnnnnnnnnnnnnnnnnnnnnnnnnnnnnnnnnnnnnnnnnnnnnnnnnnnnnnnnnnnnnnnnnnnnnnnnnnnnnnnnnnnnnnnnnnnnnnnnnnnnnnnnnnnnnnnnnnnnnnnnnnnnnnnnnnnnnnnnnnnnnnnnnnnnnnnnnnnnnnnnnnnnnnnnnnnnnnnnnnnnnnnnnnnnnnnnnnnnnnnnnnnnnnnnnnnnnnnnnnnnnnnnnnnnnnnnnnnnnnnnnnnnnnnnnnnnnnnnnnnnnnnnnnnnnnnnnnnnnnnnnnnnnnnnnnnnnnnnnnnnnnnnnnnnnnnnnnnnnnnnnnnnnnnnnnnnnnnnnnnnnnnnnnnnnnnnnnnnnnnnnnnnnnnnnnnnnnnnnnnnnnnnnnnnnnnnnnnnnnnnnnnnnnnnnnnnnnnnnnnnnnnnnnnnnnnnnnnnnnnnnnnnnnnnnnnnnnnnnnnnnnnnnnnnnnnnnnnnnnnnnnnnnnnnnnnnnnnnnnnnnnnnnnnnnnnnnnnnnnnnnnnnnnnnnnnnnnnnnnnnnnnnnnnnnnnnnnnnnnnnnnnnnnnnnnnnnnnnnnnnnnnnnnnnnnnnnnnnnnnnnnnnnnnnnnnnnnnnnnnnnnnnnnnnnnnnnnnnnnnnnnnnnnnnnnnnnnnnnnnnnnnnnnnnnnnnnnnnnnnnnnnnnnnnnnnnnnnnnnnnnnnnnnnnnnnnnnnnnnnnnnnnnnnnnnnnnnnnnnnnnnnnnnnnnnnnnnnnnnnnnnnnnnnnnnnnnnnnnnnnnnnnnnnnnnnnnnnnnnnnnnnnnnnnnnnnnnnnnnnnnnnnnnnnnnnnnnnnnnnnnnnnnnnnnnnnnnnnnnnnnnnnnnnnnnnnnnnnnnnnnnnnnnnnnnnnnnnnnnnnnnnnnnnnnnnnnnnnnnnnnnnnnnnnnnnnnnnnnnnnnnnnnnnnnnnnnnnnnnnnnnnnnnnnnnnnnnnnnnnnnnnnnnnnnnnnnnnnnnnnnnnnnnnnnnnnnnnnnnnnnnnnnnnnnnnnnnnnnnnnnnnnnnnnnnnnnnnnnnnnnnnnnnnnnnnnnnnnnnnnnnnnnnnnnnnnnnnnnnnnnnnnnnnnnnnnnnnnnnnnnnnnnnnnnnnnnnnnnnnnnnnnnnnnnnnnnnnnnnnnnnnnnnnnnnnnnnnnnnnnnnnnnnnnnnnnnnnnnnnnnnnnnnnnnnnnnnnnnnnnnnnnnnnnnnnnnnnnnnnnnnnnnnnnnnnnnnnnnnnnnnnnnnnnnnnnnnnnnnnnnnnnnnnnnnnnnnnnnnnnnnnnnnnnnnnnnnnnnnnnnnnnnnnnnnnnnnnnnnnnnnnnnnnnnnnnnnnnnnnnnnnnnnnnnnnnnnnnnnnnnnnnnnnnnnnnnnnnnnnnnnnnnnnnnnnnnnnnnnnnnnnnnnnnnnnnnnnnnnnnnnnnnnnnnnnnnnnnnnnnnnnnnnnnnnnnnnnnnnnnnnnnnnnnnnnnnnnnnnnnnnnnnnnnnnnnnnnnnnnnnnnnnnnnnnnnnnnnnnnnnnnnnnnnnnnnnnnnnnnnnnnnnnnnnnnnnnnnnnnnnnnnnnnnnnnnnnnnnnnnnnnnnnnnnnnnnnnnnnnnnnnnnnnnnnnnnnnnnnnnnnnnnnnnnnnnnnnnnnnnnnnnnnnnnnnnnnnnnnnnnnnnnnnnnnnnnnnnnnnnnnnnnnnnnnnnnnnnnnnnnnnnnnnnnnnnnnnnnnnnnnnnnnnnnnnnnnnnnnnnnnnnnnnnnnnnnnnnnnnnnnnnnnnnnnnnnnnnnnnnnnnnnnnnnnnnnnnnnnnnnnnnnnnnnnnnnnnnnnnnnnnnnnnnnnnnnnnnnnnnnnnnnnnnnnnnnnnnnnnnnnnnnnnnnnnnnnnnnnnnnnnnnnnnnnnnnnnnnnnnnnnnnnnnnnnnnnnnnnnnnnnnnnnnnnnnnnnnnnnnnnnnnnnnnnnnnnnnnnnnnnnnnnnnnnnnnnnnnnnnnnnnnnnnnnnnnnnnnnnnnnnnnnnnnnnnnnnnnnnnnnnnnnnnnnnnnnnnnnnnnnnnnnnnnnnnnnnnnnnnnnnnnnnnnnnnnnnnnnnnnnnnnnnnnnnnnnnnnnnnnnnnnnnnnnnnnnnnnnnnnnnnnnnnnnnnnnnnnnnnnnnnnnnnnnnnnnnnnnnnnnnnnnnnnnnnnnnnnnnnnnnnnnnnnnnnnnnnnnnnnnnnnnnnnnnnnnnnnnnnnnnnnnnnnnnnnnnnnnnnnnnnnnnnnnnnnnnnnnnnnnnnnnnnnnnnnnnnnnnnnnnnnnnnnnnnnnnnnnnnnnnnnnnnnnnnnnnnnnnnnnnnnnnnnnnnnnnnnnnnnnnnnnnnnnnnnnnnnnnnnnnnnnnnnnnnnnnnnnnnnnnnnnnnnnnnnnnnnnnnnnnnnnnnnnnnnnnnnnnnnnnnnnnnnnnnnnnnnnnnnnnnnnnnnnnnnnnnnnnnnnnnnnnnnnnnnnnnnnnnnnnnnnnnnnnnnnnnnnnnnnnnnnnnnnnnnnnnnnnnnnnnnnnnnnnnnnnnnnnnnnnnnnnnnnnnnnnnnnnnnnnnnnnnnnnnnnnnnnnnnnnnnnnnnnnnnnnnnnnnnnnnnnnnnnnnnnnnnnnnnnnnnnnnnnnnnnnnnnnnnnnnnnnnnnnnnnnnnnnnnnnnnnnnnnnnnnnnnnnnnnnnnnnnnnnnnnnnnnnnnnnnnnnnnnnnnnnnnnnnnnnnnnnnnnnnnnnnnnnnnnnnnnnnnnnnnnnnnnnnnnnnnnnnnnnnnnnnnnnnnnnnnnnnnnnnnnnnnnnnnnnnnnnnnnnnnnnnnnnnnnnnnnnnnnnnnnnnnnnnnnnnnnnnnnnnnnnnnnnnnnnnnnnnnnnnnnnnnnnnnnnnnnnnnnnnnnnnnnnnnnnnnnnnnnnnnnnnnnnnnnnnnnnnnnnnnnnnnnnnnnnnnnnnnnnnnnnnnnnnnnnnnnnnnnnnnnnnnnnnnnnnnnnnnnnnnnnnnnnnnnnnnnnnnnnnnnnnnnnnnnnnnnnnnnnnnnnnnnnnnnnnnnnnnnnnnnnnnnnnnnnnnnnnnnnnnnnnnnnnnnnnnnnnnnnnnnnnnnnnnnnnnnnnnnnnnnnnnnnnnnnnnnnnnnnnnnnnnnnnnnnnnnnnnnnnnnnnnnnnnnnnnnnnnnnnnnnnnnnnnnnnnnnnnnnnnnnnnnnnnnnnnnnnnnnnnnnnnnnnnnnnnnnnnnnnnnnnnnnnnnnnnnnnnnnnnnnnnnnnnnnnnnnnnnnnnnnnnnnnnnnnnnnnnnnnnnnnnnnnnnnnnnnnnnnnnnnnnnnnnnnnnnnnnnnnnnnnnnnnnnnnnnnnnnnnnnnnnnnnnnnnnnnnnnnnnnnnnnnnnnnnnnnnnnnnnnnnnnnnnnnnnnnnnnnnnnnnnnnnnnnnnnnnnnnnnnnnnnnnnnnnnnnnnnnnnnnnnnnnnnnnnnnnnnnnnnnnnnnnnnnnnnnnnnnnnnnnnnnnnnnnnnnnnnnnnnnnnnnnnnnnnnnnnnnnnnnnnnnnnnnnnnnnnnnnnnnnnnnnnnnnnnnnnnnnnnnnnnnnnnnnnnnnnnnnnnnnnnnnnnnnnnnnnnnnnnnnnnnnnnnnnnnnnnnnnnnnnnnnnnnnnnnnnnnnnnnnnnnnnnnnnnnnnnnnnnnnnnnnnnnnnnnnnnnnnnnnnnnnnnnnnnnnnnnnnnnnnnnnnnnnnnnntatcttaagtttatagtaggctgtatatacttctatataacgatttgggtttataaagatagtacagaggtagacaataatatcttctacatcggtatataggttatttaaggtcgcgcttattcttagggtaatatatagctatactttacctttatatcggctttatatatatagtttctagtagactagtaacaggtaatagtcggcattcgctttaagcttctatctaataactgtttcctatatttcgaaacggacttcctttctatcctttaatattagtatattaggtatcttcgtagacttctaactagtgattcctataatcagtatatcactttaggtttagttcattttactctaagtaagaataaggtaataggtaaggtcgttatacttatatatagcgatatctctataggcagtagccttattacattcttcggtagcttagttatattctattataagacgatctttctctatatagagtcgatcacattcttctataagtcgatcacattcttttataatttatctaatagcttccttagaccttccgttctctaagattaagacctagatttcgttatatatcatccggttattatcttcgactgtttagaactaattagctagcttaaggaatcgttccttactaggagttgtatatataatctcacagatagaaggagtcgaaggaccctccttagggctatcgcgtttaatactctcaattaggtcctatattttagtaggagttggggtttcagggttagtagcttcttctgtaagacaatctagtactataggttattttcccttaccgatcgcagcgatccgttatagtaggactataactagtcctattctagttagtttcgggataggtagggtgaaaccggactaggacaaatcgtaataattatccgtatagtcgtacagcttcagaagtttaggtttagggtgatacttgatattatattatataccagattccttttaacaaaagaagtgtatttctaatcgaatatcaagtatagaaaaggaaaagaaaagaaataaacgtgaaaacaataaataggcttttatacccctttaggggtaaagccctattctcgtttcccctagaaggaaggtgcgactgcctatgtaaacgactaacagtacaatcctaaacgggaaagtacgagtcccgcaagtgccaatcgtgacactaattatctaaaaggccgttaaaccaagatttaataaagactttacctttaaaaatcatatatagaggaagcgcctaccctactgtatttatacatttaattatgacggaaaaacggtggtaaggcgagtgtattttgtggcagaaaaatcttaataaattctctaactctctaaaactgacaatagtcctaaaacatgacaatctgatggacaacttagtaatcaaaacaaacaaaacaannnnnnnnnnnnnnnnnnnnnnnnnnnnnnnnnnnnnnnnnnnnnnnnnnnnnnnnnnnnnnnnnnnnnnnnnnnnnnnnnnnnnnnnnnnnnnnnnnnnnnnnnnnnnnnnnnnnnnnnnnnnnnnnnnnnnnnnnnnnnnnnnnnnnnnnnnnnnnnnnnnnnnnnnnnnnnnnnnnnnnnnnnnnnnnnnnnnnnnnnnnnnnnnnnnnnnnnnnnnnnnnnnnnnnnnnnnnnnnnnnnnnnnnnnnnnnnnnnnnnnnnnnnnnnnnnnnnnnnnnnnnnnnnnnnnnnnnnnnnnnnnnnnnnnnnnnnnnnnnnnnnnnnnnnnnnnnnnnnnnnnnnnnnnnnnnnnnnnnnnnnnnnnnnnnnnnnnnnnnnnnnnnnnnnnnnnnnnnnnnnnnnnnnnnnnnnnnnnnnnnnnnnnnnnnnnnnnnnnnnnnnnnnnnnnnnnnnnnnnnnnnnnnnnnnnnnnnnnnnnnnnnnnnnnnnnnnnnnnnnnnnnnnnnnnnnnnnnnnnnnnnnnnnnnnnnnnnnnnnnnnnnnnnnnnnnnnnnnnnnnnnnnnnnnnnnnnnnnnnnnnnnnnnnnnnnnnnnnnnnnnnnnnnnnnnnnnnnnnnnnnnnnnnnnnnnnnnnnnnnnnnnnnnnnnnnnnnnnnnnnnnnnnnnnnnnnnnnnnnnnnnnnnnnnnnnnnnnnnnnnnnnnnnnnnnnnnnnnnnnnnnnnnnnnnnnnnnnnnnnnnnnnnnnnnnnnnnnnnnnnnnnnnnnnnnnnnnnnnnnnnnnnnnnnnnnnnnnnnnnnnnnnnnnnnnnnnnnnnnnnnnnnnnnnnnnnnnnnnnnnnnnnnnnnnnnnnnnnnnnnnnnnnnnnnnnnnnnnnnnnnnnnnnnnnnnnnnnnnnnnnnnnnnnnnnnnnnnnnnnnnnnnnnnnnnnnnnnnnnnnnnnnnnnnnnnnnnnnnnnnnnnnnnnnnnnnnnnnnnnnnnnnnnnnnnnnnnnnnnnnnnnnnnnnnnnnnnnnnnnnnnnnnnnnnnnnnnnnnnnnnnnnnnnnnnnnnnnnnnnnnnnnnnnnnnnnnnnnnnnnnnnnnnnnnnnnnnnnnnnnnnnnnnnnnnnnnnnnnnnnnnnnnnnnnnnnnnnnnnnnnnnnnnnnnnnnnnnnnnnnnnnnnnnnnnnnnnnnnnnnnnnnnnnnnnnnnnnnnnnnnnnnnnnnnnnnnnnnnnnnnnnnnnnnnnnnnnnnnnnnnnnnnnnnnnnnnnnnnnnnnnnnnnnnnnnnnnnnnnnnnnnnnnnnnnnnnnnnnnnnnnnnnnnnnnnnnnnnnnnnnnnnnnnnnnnnnnnnnnnnnnnnnnnnnnnnnnnnnnnnnnnnnnnnnnnnnnnnnnnnnnnnnnnnnnnnnnnnnnnnnnnnnnnnnnnnnnnnnnnnnnnnnnnnnnnnnnnnnnnnnnnnnnnnnnnnnnnnnnnnnnnnnnnnnnnnnnnnnnnnnnnnnnnnnnnnnnnnnnnnnnnnnnnnnnnnnnnnnnnnnnnnnnnnnnnnnnnnnnnnnnnnnnnnnnnnnnnnnnnnnnnnnnnnnnnnnnnnnnnnnnnnnnnnnnnnnnnnnnnnnnnnnnnnnnnnnnnnnnnnnnnnnnnnnnnnnnnnnnnnnnnnnnnnnnnnnnnnnnnnnnnnnnnnnnnnnnnnnnnnnnnnnnnnnnnnnnnnnnnnnnnnnnnnnnnnnnnnnnnnnnnnnnnnnnnnnnnnnnnnnnnnnnnnnnnnnnnnnnnnnnnnnnnnnnnnnnnnnnnnnnnnnnnnnnnnnnnnnnnnnnnnnnnnnnnnnnnnnnnnnnnnnnnnnnnnnnnnnnnnnnnnnnnnnnnnnnnnnnnnnnnnnnnnnnnnnnnnnnnnnnnnnnnnnnnnnnnnnnnnnnnnnnnnnnnnnnnnnnnnnnnnnnnnnnnnnnnnnnnnnnnnnnnnnnnnnnnnnnnnnnnnnnnnnnnnnnnnnnnnnnnnnnnnnnnnnnnnnnnnnnnnnnnnnnnnnnnnnnnnnnnnnnnnnnnnnnnnnnnnnnnnnnnnnnnnnnnnnnnnnnnnnnnnnnnnnnnnnnnnnnnnnnnnnnnnnnnnnnnnnnnnnnnnnnnnnnnnnnnnnnnnnnnnnnnnnnnnnnnnnnnnnnnnnnnnnnnnnnnnnnnnnnnnnnnnnnnnnnnnnnnnnnnnnnnnnnnnnnnnnnnnnnnnnnnnnnnnnnnnnnnnnnnnnnnnnnnnnnnnnnnnnnnnnnnnnnnnnnnnnnnnnnnnnnnnnnnnnnnnnnnnnnnnnnnnnnnnnnnnnnnnnnnnnnnnnnnnnnnnnnnnnnnnnnnnnnnnnnnnnnnnnnnnnnnnnnnnnnnnnnnnnnnnnnnnnnnnnnnnnnnnnnnnnnnnnnnnnnnnnnnnnnnnnnnnnnnnnnnnnnnnnnnnnnnnnnnnnnnnnnnnnnnnnnnnnnnnnnnnnnnnnnnnnnnnnnnnnnnnnnnnnnnnnnnnnnnnnnnnnnnnnnnnnnnnnnnnnnnnnnnnnnnnnnnnnnnnnnnnnnnnnnnnnnnnnnnnnnnnnnnnnnnnnnnnnnnnnnnnnnnnnnnnnnnnnnnnnnnnnnnnnnnnnnnnnnnnnnnnnnnnnnnnnnnnnnnnnnnnnnnnnnnnnnnnnnnnnnnnnnnnnnnnnnnnnnnnnnnnnnnnnnnnnnnnnnnnnnnnnnnnnnnnnnnnnnnnnnnnnnnnnnnnnnnnnnnnnnnnnnnnnnnnnnnnnnnnnnnnnnnnnnnnnnnnnnnnnnnnnnnnnnnnnnnnnnnnnnnnnnnnnnnnnnnnnnnnnnnnnnnnnnnnnnnnnnnnnnnnnnnnnnnnnnnnnnnnnnnnnnnnnnnnnnnnnnnnnnnnnnnnnnnnnnnnnnnnnnnnnnnnnnnnnnnnnnnnnnnnnnnnnnnnnnnnnnnnnnnnnnnnnnnnnnnnnnnnnnnnnnnnnnnnnnnnnnnnnnnnnnnnnnnnnnnnnnnnnnnnnnnnnnnnnnnnnnnnnnnnnnnnnnnnnnnnnnnnnnnnnnnnnnnnnnnnnnnnnnnnnnnnnnnnnnnnnnnnnnnnnnnnnnnnnnnnnnnnnnnnnnnnnnnnnnnnnnnnnnnnnnnnnnnnnnnnnnnnnnnnnnnnnnnnnnnnnnnnnnnnnnnnnnnnnnnnnnnnnnnnnnnnnnnnnnnnnnnnnnnnnnnnnnnnnnnnnnnnnnnnnnnnnnnnnnnnnnnnnnnnnnnnnnnnnnnnnnnnnnnnnnnnnnnnnnnnnnnnnnnnnnnnnnnnnnnnnnnnnnnnnnnnnnnnnnnnnnnnnnnnnnnnnnnnnnnnnnnnnnnnnnnnnnnnnnnnnnnnnnnnnnnnnnnnnnnnnnnnnnnnnnnnnnnnnnnnnnnnnnnnnnnnnnnnnnnnnnnnnnnnnnnnnnnnnnnnnnnnnnnnnnnnnnnnnnnnnnnnnnnnnnnnnnnnnnnnnnnnnnnnnnnnnnnnnnnnnnnnnnnnnnnnnnnnnnnnnnnnnnnnnnnnnnnnnnnnnnnnnnnnnnnnnnnnnnnnnnnnnnnnnnnnnnnnnnnnnnnnnnnnnnnnnnnnnnnnnnnnnnnnnnnnnnnnnnnnnnnnnnnnnnnnnnnnnnnnnnnnnnnnnnnnnnnnnnnnnnnnnnnnnnnnnnnnnnnnnnnnnnnnnnnnnnnnnnnnnnnnnnnnnnnnnnnnnnnnnnnnnnnnnnnnnnnnnnnnnnnnnnnnnnnnnnnnnnnnnnnnnnnnnnnnnnnnnnnnnnnnnnnnnnnnnnnnnnnnnnnnnnnnnnnnnnnnnnnnnnnnnnnnnnnnnnnnnnnnnnnnnnnnnnnnnnnnnnnnnnnnnnnnnnnnnnnnnnnnnnnnnnnnnnnnnnnnnnnnnnnnnnnnnnnnnnnnnnnnnnnnnnnnnnnnnnnnnnnnnnnnnnnnnnnnnnnnnnnnnnnnnnnnnnnnnnnnnnnnnnnnnnnnnnnnnnnnnnnnnnnnnnnnnnnnnnnnnnnnnnnnnnnnnnnnnnnnnnnnnnnnnnnnnnnnnnnnnnnnnnnnnnnnnnnnnnnnnnnnnnnnnnnnnnnnnnnnnnnnnnnnnnnnnnnnnnnnnnnnnnnnnnnnnnnnnnnnnnnnnnnnnnnnnnnnnnnnnnnnnnnnnnnnnnnnnnnnnnnnnnnnnnnnnnnnnnnnnnnnnnnnnnnnnnnnnnnnnnnnnnnnnnnnnnnnnnnnnnnnnnnnnnnnnnnnnnnnnnnnnnnnnnnnnnnnnnnnnnnnnnnnnnnnnnnnnnnnnnnnnnnnnnnnnnnnnnnnnnnnnnnnnnnnnnnnnnnnnnnnnnnnnnnnnnnnnnnnnnnnnnnnnnnnnnnnnnnnnnnnnnnnnnnnnnnnnnnnnnnnnnnnnnnnnnnnnnnnnnnnnnnnnnnnnnnnnnnnnnnnnnnnnnnnnnnnnnnnnnnnnnnnnnnnnnnnnnnnnnnnnnnnnnnnnnnnnnnnnnnnnnnnnnnnnnnnnnnnnnnnnnnnnnnnnnnnnnnnnnnnnnnnnnnnnnnnnnnnnnnnnnnnnnnnnnnnnnnnnnnnnnnnnnnnnnnnnnnnnnnnnnnnnnnnnnnnnnnnnnnnnnnnnnnnnnnnnnnnnnnnnnnnnnnnnnnnnnnnnnnnnnnnnnnnnnnnnnnnnnnnnnnnnnnnnnnnnnnnnnnnnnnnnnnnnnnnnnnnnnnnnnnnnnnnnnnnnnnnnnnnnnnnnnnnnnnnnnnnnnnnnnnnnnnnnnnnnnnnnnnnnnnnnnnnnnnnnnnnnnnnnnnnnnnnnnnnnnnnnnnnnnnnnnnnnnnnnnnnnnnnnnnnnnnnnnnnnnnnnnnnnnnnnnnnnnnnnnnnnnnnnnnnnnnnnnnnnnnnnnnnnnnnnnnnnnnnnnnnnnnnnnnnnnnnnnnnnnnnnnnnnnnnnnnnnnnnnnnnnnnnnnnnnnnnnnnnnnnnnnnnnnnnnnnnnnnnnnnnnnnnnnnnnnnnnnnnnnnnnnnnnnnnnnnnnnnnnnnnnnnnnnnnnnnnnnnnnnnnnnnnnnnnnnnnnnnnnnnnnnnnnnnnnnnnnnnnnnnnnnnnnnnnnnnnnnnnnnnnnnnnnnnnnnnnnnnnnnnnnnnnnnnnnnnnnnnnnnnnnnnnnnnnnnnnnnnnnnnnnnnnnnnnnnnnnnnnnnnnnnnnnnnnnnnnnnnnnnnnnnnnnnnnnnnnnnnnnnnnnnnnnnnnnnnnnnnnnnnnnnnnnnnnnnnnnnnnnnnnnnnnnnnnnnnnnnnnnnnnnnnnnnnnnnnnnnnnnnnnnnnnnnnnnnnnnnnnnnnnnnnnnnnnnnnnnnnnnnnnnnnnnnnnnnnnnnnnnnnnnnnnnnnnnnnnnnnnnnnnnnnnnnnnnnnnnnnnnnnnnnnnnnnnnnnnnnnnnnnnnnnnnnnnnnnnnnnnnnnnnnnnnnnnnnnnnnnnnnnnnnnnnnnnnnnnnnnnnnnnnnnnnnnnnnnnnnnnnnnnnnnnnnnnnnnnnnnnnnnnnnnnnnnnnnnnnnnnnnnnnnnnnnnnnnnnnnnnnnnnnnnnnnnnnnnnnnnnnnnnnnnnnnnnnnnnnnnnnnnnnnnnnnnnnnnnnnnnnnnnnnnnnnnnnnnnnnnnnnnnnnnnnnnnnnnnnnnnnnnnnnnnnnnnnnnnnnnnnnnnnnnnnnnnnnnnnnnnnnnnnnnnnnnnnnnnnnnnnnnnnnnnnnnnnnnnnnnnnnnnnnnnnnnnnnnnnnnnnnnnnnnnnnnnnnnnnnnnnnnnnnnnnnnnnnnnnnnnnnnnnnnnnnnnnnnnnnnnnnnnnnnnnnnnnnnnnnnnnnnnnnnnnnnnnnnnnnnnnnnnnnnnnnnnnnnnnnnnnnnnnnnnnnnnnnnnnnnnnnnnnnnnnnnnnnnnnnnnnnnnnnnnnnnnnnnnnnnnnnnnnnnnnnnnnnnnnnnnnnnnnnnnnnnnnnnnnnnnnnnnnnnnnnnnnnnnnnnnnnnnnnnnnnnnnnnnnnnnnnnnnnnnnnnnnnnnnnnnnnnnnnnnnnnnnnnnnnnnnnnnnnnnnnnnnnnnnnnnnnnnnnnnnnnnnnnnnnnnnnnnnnnnnnnnnnnnnnnnnnnnnnnnnnnnnnnnnnnnnnnnnnnnnnnnnnnnnnnnnnnnnnnnnnnnnnnnnnnnnnnnnnnnnnnnnnnnnnnnnnnnnnnnnnnnnnnnnnnnnnnnnnnnnnnnnnnnnnnnnnnnnnnnnnnnnnnnnnnnnnnnnnnnnnnnnnnnnnnnnnnnnnnnnnnnnnnnnnnnnnnnnnnnnnnnnnnnnnnnnnnnnnnnnnnnnnnnnnnnnnnnnnnnnnnnnnnnnnnnnnnnnnnnnnnnnnnnnnnnnnnnnnnnnnnnnnnnnnnnnnnnnnnnnnnnnnnnnnnnnnnnntagatttataataggattaactataatagtaaaggttataataagaagtaaatactacggttagagatcacttttataacctagaaatcgtaagtaggtaactataattaaatatataaacttagtaagataggccctccctctatatattatttttaaaggtaaggtcttccttaaattatagtttaaaggccttcctagtaactagtactttaaagttagtctaaataagtagatattagataaaataagcctttattagctataaaagctctttattctaactacttcttcttatataaagggagtatatcgacttttagtacttaatagctatagaagctatttaaccctaaaattcgataagatttataagaaaaataagattataccaatttatatactactacatttatcttaccttttataatcccttaatatcagttattttacagtagtaaaacggtcgtatagccggttagttaagataaaaatatagactaggattaactatattaataaacttaagttcctagaagtatacccctctatataaattaaagctttgaaattagagacaattaaaaatagcttcttagcagctagtttaataccttttttacctaatcaggtactttcaaaacttaatatttatctttgaatactaaccccccctcctagtagggatagcgatttaagctagaattttaccctaaaaaccccttttaatagcaaagatctacatcgataggcttcgttaatcaaagctttacttcgtacctaatctcgaagcctaataagcccttctaagtgtacattagatcaacttgtcaaaggctgccagattgcaatatatagtgctattctactagcaaaagaaaacaaggatttacaggatgaaaataagaataagaagcaaaagcgggccagatctagacggcagatacctaccgaagaaggcctctcagttcaagaagcttctgaaataattgctggactggtagaagcatcagaaatacccctacaccccccggacggaagcacttaatcagggttggaaccacgaccacgggctgcaccaaggtgtagtgggtgtggaaagatagggcataagatcaataggtgttcagataaatgatcctttttagtttaattaatttaatggcgttttggttgaaatatattccttagaaaactatactcttgggtagggtggcggctcgcttacagtggcggctcgcttaccgattacgttactccggattaattgcttagataataccatagttaagccttggaagctcccgagtctggagaagtctccctaattaggcctagtcccaacttatactcgctaattctgctaattctattggcttgattcttataccgtcttttagaattctgccggtctaagtatgattacataatgcaaaatgaagccttacgtaaccaacaatgccaagacttagttacaaggcttgtagcttcttcgactgtccaatgtagatcccgctgtcatgacgacatatactaaacttcagtgttatacatagcattatgattgaacttattggtagaaaatagagcattccaatcaaactaaggcactatacacgcaagccaacgcgttccaggaacgagcgaagtcaataaatcttagaatcctgcttagggttggtgacagcatcacgtgcagagcctccgaggccatgacgtcttcctcgaacctgaaaaacttccccataagaccacctcgtctcttaatcctcccgagcttcaattgcttcccctctttggtccaaagaatctctattgctttagtctttctgtgtttgttgcttgtttactacagaattgctgcttctcgcatttgtttaccttcacccctcagctgtctttctgaagctctcaacaccccgccccttcgattaatccagaaactcgattttataagtgtcgctgattgacaacacacagcacaatgactctctactactcccttgtaagcctgacaagttccttctctagttgcttcttgttgtgtttctcaagaagttctcgagaatcgttgcagcctgatgcccgaaactgtctacccagcccaagcgtctccaccctatcgatgaactaacacaatgccctcatataggtattcctccttctggtgttcgagatgggtgtattcctggccctcgtcatccctctccctcatgtcgttaagcgcaagctgtttgccttcatctcggagagcccgatcatagccaaattacaatatggactgaaggtatattgccaatttgaaaccacgtttccggttacactgctaaactggcctccagattacattcatcttcatcctcattctgttcatcgactccgtgaaccgtgtgtaccgtgtgcagcaggagctgtccgccttcgccaaggacggtcccggcatggggtaagtaatcaatcctcaggcattctagcaaaatttctaaccattgttaccaacagagccgcccacctcggtaccgaccgcatggaggtccaggcccgcaagttctactcgcagcgcaacatgtatctctgtggattcactctgttcctctccctgatcctcaaccgcacctataccatgattctcgagactctccgccttgaggaccgcgtccgtctcatcgagggcgacaagaaggccggtggaaaggactcagcccgtatcgcggaggctggttcagtcggcgagatcggtcgtcttaaggagatcattgccaccaagaaccgggatattgagactctcaagaagcagtgtgagggtctgacccgcgagtaccacagcctgggtgaccagatttccaacgaaaagggtgataagaacgagaaggacaagaaagacctgtaaaagggttgcattgttcgattccaccggacccagactgtcgaagcccaagctttgatagactttcactcgcgcacctttacgtttgcgttggattgagggtctcattccctgtcaagggagttggaaccctctctgcaacaaaatcacttgatacattatggattaagtattgtgcgtaactaccctttctcgatgtatggactctactattatgtagagggagatgtgggaattgcaattggttcctatcgctgtattcctttccatgtactagcaaatatcttctaaggtttttcggtgggatccatagtgctgattctgtagcacttgtcatattcaatcaatattaccctttcatattcaattgtctattgatccccgtcatagccgcgagtgtccagtgcatcaaaagctaaggaccagaccaagaattgtcatgtctagagatcgtaaattacatagtatgtataagaaccagccgatcacggctgtggcatatagaaatatcaaaccaggaaggtccaaaagctaggatataccagctcctcttcaaagatccttcggacctgcgcgagcacaaaccgctcaaccttcccaacattcttcaatacctgcttcccatcttccttgcgaccaatctcactgtccacccggatctcctgcaacaacccaccctgccgcttcagatccttctccttctgatcgcccccagaccgaggccgaccatcatcactgggattttgactgctctgagactgttcagatccaagcagggcatctgcgtcctccggagaaagaaaacagaaatgcacccgcttgcggatatacgcaacaacggcaacaccgtcaaacgtgatgcccgtgacattcaacttcaacggcagccccacaaagctgggcatcgggtagtcaagcaggatctccgcggtcagggacatgcgcacgtcgccagcatacttagcatggcacagcacctggaagtcctccgggcggcgctcgcgcatgcgcggcgggatggggaacgattgatgctcggcggccgggtcgtctgatatctctattgagggctgcggcgcgtcggttgggtcgcttgtatgcggatttgacccactgctgccggtgtggccgagggaaggatgggaggagagtgtatttgcggttaaggggcgggagccggaattggtggtgcccaggtctggctctgcgaggtgatgtgtaccagcagggcgggctgcttgggacctgggtccggcacccatacctgaatctgaccatccgctcgcaaatggagtgccgcctgctacggcagcaaggggtgtctggtttcctgatagaccgcctagagaccgcatgtggtaccccaatgttgacgtaccgccgggaattccaggtgtactggcgcgcggcatgaaatgcggattaaggtgatcgcctagtggggatcgaagcgcggatggctggaagccttcaccggggtatggatggtgactgaaattatgaaggctgtgcgcggtgggattgaaggtcatgtcgtcttcgtatggggattcttggagctcggacatgagctcatctgaggtggaggtatcggcatcatcatcgtcttcctcgtagaaatccgcgaacggttcgcagaagtctttgatctcgagatctggcgcgatggtcccgaaatcgaaggagtgaacctgaaccgagcgaataaagcgcggtagggtgatctcctggaacttttcgtgtacgaacgaccggattcgctctgctagggcttccccgtccgggccggaggtggcagctgcccagtcgacttcgattgacatcacatatgcaatgctatagcacttgatgcttgtacatatcaggggagatggaggacctcgggagcccgtgacggtatcaccacgtgatatacggagtacatgatgacattccggccagttccatcgataccaactacatccgaagcagtgattgacgaagtgctaggaaatataatatattcactgtgcgctcactaattactacctaagagggttaatatccatcctcctctctggatacactcataccaataacttcaaaacattctcccatccaccgtagagccggatgtaagcacatttcattcacaaatcatatgcagacgctttccatcctttccgtcctttccatccgataattctgtctgatccgattttctcttcatgggtcccgactgttttgataatggccggggatccaacttagacttgtgaaagtcaatgatcaatattcggttaagttcagggttccaaaggatatttggatcccgaagatccccgtgagtaaccctcagcttgcgaatttcccttttcgaccggtgaatctcccggcgaagcaacgaggtcatttccatatgcactatgttctcacctccccagcccataatgagcatgtgagaaatgtctcccgcatcatggtagtagtccactaacaggtcgatagtaccgaggaaaacaggtactgcggacccttggactttgcgaagaatctggtaaatttctgcttcgcgggagacttccttccaaagccccgaagttgttccttttccaacgaccgtatagccataggcagtacatgtaagtttgaatggcgcaccatatgacccacatgttccaaaaggcgtacagtctttgtcacggttctcacctagttggattttcaataaacgcactagatctcctgcattgataggatgtttatgatcatctggactttgtcgatgaagtgacacgtttgggcaatgctcgtctagagtaccgccagtctgtagcccgagtaaacaccgctgagtgcaaaattgcgcatcgtggcgatatgactggcctcttcggtcgtttctaggctcttgccgagtagacggggaggatgtgacttgactgatgcggcgctttcgcctttcttggttcgtatcggaacctgatgagtttggcgactccgcacggtgtcggtcatccgttggtgcacacccggcaggttgagagcttgtagacgactgacgaccttcttccgtaggggcattagattgaggagaggaaccagattgaggcgacgggtgatagtcggtactggagtccggatccgtaacctcagagtggaaactactttcacaggatcgagggatttgctgtaattcttccttgggaatctcagaaagagtatggtcgaagttggttttccaagtacggagcaccgaccgcgcattagatctccatatctgatcacgcacaggggatcggaatgccatcagacaaagacatagtacatgagcaattgaggtattcggaaattgaaagttcggttcgctttttctgttaggatcacagaaaaagtagtacaatgtactagggttgtcgtatggaacgcggagtaggacacgcgcaatcccgttcgtcacataggaatattcgagtcctttctgaatcatcacatggtattcctggacaatagcggagcaggcgagtcgctcagcattgtacctagcctttccatcgacgtcgttagggattgtattagtatagactatcttctcccataagttcattggtcgaagccctaaacgaagagtttccaccgaaagcttgtgggggggtttatattcaaccgtcgtgaggatgctttgggtgtttccatcaatacgacggatccaaaactgatcgggttttgggttgggtatgctcgagggctgacttgtatccgccccaacagcttcggcgttcaaagcatttatatgagagctgaactcgattccatcaccaagcccgaactcctctcgagcaagaggaagtttgctcaataccgtgattatatcattgactggatattccacagcgtactgctcgtaatgctctatgcccttctcgctatcgatcggcttgctagtaaggcgttcttgatatccctcaatctggtgcagagaagggaaggcccgcagcgaatcctccgattgtaggtacccacacacagcggagtagagcgcttgctgttgagctggacaatcaacccacaattcgagtcgtgtcgggcaaaactttccagtgggggcgggtatttgacctgtggtcgacacggatatttccccgactctcaatggaagggagagtagggagtggcaagagcgcaggagttccatgaaagtggtcggtcgagtgcgctctttttcctttcttgcctcgtcttctgcctgtcgacggccctcttctgcctgtcttaatttctcctcaagctccaggatgcgataattgacatccgaaaagctattgctggccatcgtttagcccaagggatattaaaaatagctaacagctttgaaggttgctgggaaaataggttgctggaaggaaagggctggggatatgttagaacacggctcccggcaaaggtatatttccgactcagccaaccagctcggtggttgcctagatggcgttttcactcggcagaaaattgagcaaaaagacaccttagaaatacggctttagcaacgttcaggaagggatatgaagctggataatataaacaattgaggggtaaatggagaggcggtgaattacgccatgacccacagtttgaggctctgtacggcaggttttttgggtccatcgcgccaacctatacaagcccttagaagcataagattatttctgatctttctatcggtctttctatctgtttttttgaggtcttttttgatgtcttttagaatgcagccgctaaccaatagtaggggacctttgtgtcagatcaatctgaagaagagctatataagaaggctgcttcccactcttgcacttacttcttctttccttcttcatcttatctgacggttgtatggtttgttcagtcaaaccatgcatatgaggattttactcgcttgtcatttatggaaggaatgattccttccacatacggcaagagagtcacacactctgccctattggagtcagtgaggaccaaacagagatgcaaattgcgtttcattagctgcctcccagggggtgaacctataccaggatctaacgtaccgacctcgtgagacccgcagttgggatgtttgcgctgtacaagatggaacctctcccgaaggtggtacagcatggtgacgaaaatcccggaaagctatggtctacaccacctggtcgacaagaccattgagagacccgatcgtgacgccgcaaacgcagaaacttgaatgaaattaagtatgcaagtaaacacctgcttgcgactctgcatcgaccctaagatctttgtcgctggttgcatagctgttcggacgtgacctcctggtctgctcccaacatcacttttccggatatgttttcacggtgaagaccgacaataagtataaacggccactactttctaaggaacctttggaactgaggtggcacctgtctcgcattgcttgtatgcagggcagatgcgagaacgaagatccctggtggttagccatctcgtcatattattgctgcacatttgttcagttatatacacggacaagcaacaatggatgctatttttagaaaaggaagtgacatattttcttcttgccactagaaagtttcgcccgacgcgactcgaattgtggttgattgtccagctcaacagcatgctctactccgctgtgtgtgggtacctacaatcggaggattcgctgcgggccttctcttctctgagccagacagaaggatatcagcaacgccttactagctagccgatcgatagtgagaacggcatagagcattacgagccttaagctactactcggtaagtatcaagacaaagcggacttatcgacaatttgtgcaagcttgtggatcattgagggtcaagagactgttccatagcctatggatttctacaaaaatatatatatttcccttttgcttgatattgctgtgttatattggatattggaattacatacatcggccactataccagccattgagataaaattgtgtggcaatacaaaaagattttcataaaaccaggacagcatgatatactgcatatcaaaacacagctttgtggtctctcaatttgtccacaagatggtattgtctaaggagaggaagatccgagaacgcgtagatagacatatcaacacagagaaccaccggcaaacaatgacagaaaggacataaaaagtcaaacgacagcccgaaattccagaatgaccgatgtgaggcaacaaatgagatagcctccaaatagtagatgtgacacagtgatatcttcttcttccctgaagcagacatagacagggcggggaagccaatcactcgatgacagtctagaacatagcaacagacggcctcgagtctccgagtcatttggtatctatagtatctcgtcagtcaaacttcttgctggcaacagccgtctcaaaatatggaaggtgcaactcacgtcagaagccaatttaaccaccgtgacgagggcaattggagtttactcgtgtacgagtctgttccttgacacctggacagccaggagtgccttgatgggcacatgggactatgccatcttcttggtgcgtgcacccgcaggcgtactgaaagatgtagatggaacacatattgagggttgagtgaagaggtgaagttgtagaggatatataagcagatattgtgaattgaagaccacttagtttgaatgaggccttgaacttttgatattggttgatgtgatgagaagcaattagaggatcaaagcccggctttatagtattcgatggctacctcaagcgaagtgaatggcctgcgcaactcaatagagaaaagaagctaggaaattatcgacagtcgcaaaaatggttcggtccttcagtcaccttgcacaagcgctgtaactcattcaactagatgcgccatatgcagccagtgactcaatgatcacttgttgcgcagtcaaagagaaggtgacggtaggcacggaaatagtatacacatgcgccatatccagggcgtatacatttaccaacagaaagtagagtttgtggtaggtggaccgttagagtgtggcgtaccattggggagagtcaagatattcgatggggttcgctagtagcagcaaaccctaagcatgactaccgatgcaaattctaaatcccgcaggctgcaagaagcacttgacatcactctaaaagcgctgcagccagtgttagggcgtatgttctgagcgccaacagggacccctctcccgatggcaccccatagggcaatgctgcggttgaagcgttgatcaggaacatggtttgccccatctaagaaacctctatgatcctgatgtctaaccttaaagccatcgctcatactccgagaaaggcaactgccacagcttttttatgagcctcaccgtaggcggcgcaggaggtgtgaccaattggatgatacctgtgagattacagtgactcttctcgaattctgtatacttggatattcaatataaccccgggaacccgagtacccgcatagggctctagacacctacgttgttgcaatggactagataggtaggtcctgggagtaatcatcgagagccaacgaaatttaaagaaagcagtcctccaagcaaaactctaccagttcagtctcgatatggcaggagatgacttcattgactctattgcaatgggcttcgacttgtggatataggcgaataaggctcatctctatggcgcagttggtgattaccgcaagttctgcgcgattacaatgcgaaagactgcatggtgacaaggctttttcttaataataatgagttcagcgagtaaaggataagaacaattccagccaagaaaatccggacttgctatggttagtatggccggtgttgccggggtgcgatatcagccaagaggcattctttgtcgaatctagcgcgatcgtgctgtggggcctaggcaaaaataaaccaatactggcctatcagttgattctagagcgctaaagactggcgagaagcaccaagttcctcagccaaggcacagtagcattcatatgggttcgactgaggctctccccttgctgaggcaccgacccaccggaagatttactccgagcgagtagagacgcgcggggctagtggcggcaaggcacagcgcgcaatcgataggtcgagagcagttgctgagcagtctgctttgccgctgttggtttgtaacttttaggcattgcagagagcggagaaaagtaagaacggaaaattacttcaaaggttaatgtttgcattttactgcatgagggttttaccacgtgaggagtgtttccaaggttcagattcaaggttaaataaacatgggggaggaaccatggaaatgaaaaatctaatctgtttcttatctgtttgaaatactagcctaggagatccgcttgaaacaatttgcttctcacatggagtaagtgatatccccgagtgacgactactcgaatctagactgttgacgatatctcgactcgattcttggaacattggaatatgatgtcacatttgtgtctttcttcctgcaaagagtagcgaaattatcgctatcagggcccctaagagaaaagaccggggagatcaaaataccccagcatagccggtggcccaagcgcccatgcagcggttggaatgattggcgaagaggattatcgacgagataattcggaatgcgtaaggatttccacccgagaccattattaacaacacatacaggataggtgtggaggcatacgggagcctgtggaagccatgagttttcgtgtgtcggccccacatcctggctgttgatcttccgaggtccttgagtttcggctggcaacggcatatcgcgcgatgacgcttatacatattcgccatggctgctgggaatgactgtcagccgcccagactctggtgcgactatgccagagccaagagaggcgaggtcgaagcattcagagaaagaaaaggtcaatagtgaactcttggctttgatccccccttttttcggccaagacatgtgaatctccccagcatatttgggattctcctttctgggcttaaacggacgataatggcggggacctcgtatccactcctccgtacatatgatgtgctggatgcgttggatcggcattggatcggcgtgattcgggcttatcattgatacagcatgcccctcattctctacggtcctccctcttggcttatctcagtctggactatataagctaggtcgaaactccctgagatttcccactttcatccaaaacaatccatctaaaactctccttcaatcccgaaatatcccgtcttttaaccgatctacttcttccgcacaaatccttcaaaagttttctcagaatgtacacttacactgccactcaccgtttcttggtcctctccgccactgagtctggcccttactaccccgccaacaagttcctcgtcttgtctcccatcgaatgtggcccggatccccgcgtctgggaagaccagccccaaattgagaccagctcgaacgaggaggacactgtgccggctcctgccaaccgtgcccgcaccaatagctctgtctctaccgactcttcagtctccctcgatgacactgctgccctttcgcccggtttcctctaccttggccatggcaagaagcagcactaggtactctctatcattggccggcctagtggtttggtctcctttttcaatcctatttcgggatatttcaccgtcacagcaactgatccataattgagcttaccatgtgttttcttgttttcttctttcttttgcaatcttgatcaaattgagcgactccaatcgggagctttgggaccaccctatcatgggatagggcaggaaaatcaataggggtgttttttttttcgtggcgctttcaaattgccatatgcttttcattcagaatttgtctacactctcacgtctttcgcctctgggaagcatctgtattgccccattcggccagctagcaatcaatgaacaacagttcaaaccatccgcgtgattcttttccaccccacttttgccgccaaattgtgcacactagttacatagcccacctgactaaaatacaaggttgtacggaatagaggaatccccgtcctgtcggacgctagggagacccctaaatgcttgccaagtgctgccaagatgatgatttcccgccaagccttgtgcaatctgatactcccgccttggctggggtagggattgacggggtcaccgcggacaatgttccacggccaggcaacagtgcccattatatgtcgtggaagtgtatatgggctgcgaatcctgccaagcctccctgtcttactacgatagcttaccagtccacaattattttgttttcttttattgatccctccttgcacgttgattgtttcatggattagattggcttgttcgagttaagaccattcttggcccacaattgccagctcgattttctagtcttcattctttccggtaagacggtctgctcttcccccctttacccctcatcaacttattatttacttccccgcacatttctcattccccaggaagaatgcgggcctacaacatacgatgcactatttagcctactactatatagtttcggttcgaaatttcaagtccccgtgaccaataagacccactaatttcaaccacatgacaggtgttacgcgagatggactgtaaaaaggagaattagccgagtggcttttcaagattcgagttggctagaattaggtacctgtctaggtactcagggcttgggctagcactaaggttctcacgggtcaattgctaatatccctggttctgtgagtaatagatctgtgttactgtgctttacttttagtacccgtttccccccctctagatgctttgtttgcgagcctcgtggggactgcacgtactttattttgaatttgcttaggaaatgtccgatattatccatttatcttatatacattttcagaccgccgactcttaggaaaggggcaatgattgtgttcctccgtctgaggtatttcaagatatagctcgaggactgtatacaacattgtttatctgcttacgcttctaaaattaagagcaacttcccaatgaaagtctgaaattttcattcaattcatgatagtgacatcgtcctcgcagatcaaccgcataggatgcttcggggacttggcccttaatctcatcttaatcgcaacgccctcgttatgagtttgatattcaccgacgttcaagcctcggatgagacacattcttaacctcttcctccagatgatgcttccacttgtcatttcactacaaatatttccacagacaaagcccccgcgaacgggaacagggacgggatccaaaccataccacacatgaatattgatctatcaccgcaatcttcagtaaacttcgcgctgtttggagacctagttgcgcaccaaatatataatatgaatcttgctagctgcgagttccaaaattcggcgcatcaaaagagacttcgcattgccaaccacgagagtttcgtcttctggatactgtaagtaggaaagcgcaggagaatataaattttctataccgacgaccattgcaattacgagttccctacgtacccccacgacatcggggttgtcctcgatgtgcacgtacgccacatcggaaggtatcagactcccgtgaaagtctagagcagggattacgaccatttgaacgatgcgaacagctcagtggactctataccatccgaatgtgcgtccagcacccaacctgccctaccacgatgatatcaaacttgaagaagacggtagtcgaagaatacataatgataaaagttgcgacgcgcgacccgaggcgtcgaaactaattggtctggtatagccaaagagtgagaatgtaggggatgataatgaaatatattctttacaatatagctagctgctccgtacacaaggtacttcagggtcaactaacgatgacggtaatagatacctccctcgcagccggttcccatatataagacttgccattaattagttatttttccattcctaaatggtcttcccaaagtcctccaaggtgataatagcactagttaaatacctggaattcaaatgcgtaagatgtaagttggcgataaatgtaaattccctgggcttgaatacaacttcggatcaatattaatatcgctctagaatatgtcactacagagtttctgtaagagtcatgtcactgtagtgcccatttagagtcatctcataatcttaggacgactcatttttcatgaggaaactgcccatgacccatactcattcataaagctctaattttgtagcaaaacgaaaactatccgtatgattcctatgcactggcaatgccatcatataatcctgctttaaatctttcgattatgtataccatacttgtaaaaaggtggccagcagtcattagtccgctgagacactatagggtcgagaaatcaaatgaccccattttatccgagtctgcatacataaaggacacacattaagacttgatgcttctctgtgcagtaactggaatttagggttgactaaatagtatttgtcggcgtttaggcaaacttcgtatatctgacttgatgttattctcgcaatattgaatgaacgtggagaactgatatatctcgctatatagatcaatctgtatatttaagttgtatgttacacgtcgttgatccaatactactctcaattatcccgtgtcgtgcattttgaaagtgacatgctatttttggctaccgtctctggtgggaacagccaagacaagcggagcaatggatattgaaagattatatcagcctgaatcagactgcagatctagaactataaagtacgacgctgtaatcatgactcaataaaagtggtgcagcgatattataatgcataataccggccagtttttggcctattatgattcctagggttatctagtgagagctgagtacagggaatgagccttgatgcctgtagggtaaaggggacaccatccgccttcgatgtgcgcagcgagtagagtagagacgatgttgttacacttgcaccgtaccgttgtgagacgaatcctacgatatacacctaaaatatcaacgaattacaacataattattggttcagaaatgcggactacaccgacacatacatgaaacacaggagcgatgcttttgggaaggatctcctttttgggtatccgtatataggcggtatagattggctcaactgcgaaatgtctcacttttaattactttggggttgggggtatattactgtacagctcgttctaccccaatacattgtaaataaggaaacaggttgggcttgtgaagtcatcgggaaatgatgatacataatggcctgatccggcaatgttgattactacgcggggtggcgacgaagcccgaaataaacccgaatgaacagaaacggaccttcaattgttagttttagctcaaagtaagaaatgacttagcttctacggggtagttttacccatgttctttatatgtatgttgtacaaagtactaacgggcgatgccgagcctcggaagttcagaatgtttcatcgtgcccggagtacgcgggttttccgctaatatattacttagttagttatgttaccgaggtacgtatttaatgataattaaggtacggagtactccgtatgttgtatggagtattattgttagcctatttctttgagtgtcttttgagggcgctaaggaatggaagctgcccaactgcttctgccgcgtttctagcgccaaagccaagaccccgttgtgttccgactgaatcgccggtcatttaacttatagtttccaagccactactatttccaataaagagatcatagaatggggtaccttaaaatatatactagagtgctatattgttgtagcaacaccagcccccggttattgacacctgctccttcaaggctatgtaatgacgaagtgttaactccgccagatctcttatctgagattgccccttgcagatgaccccggatttagcgtactagtatctgagtttctttggcgcatctatctctcgctttacatctatgttatatagatctaactcacggtcacggtccccagcgaatataggtaggaagtggagaacgtttcttcacaatgaaccagaaaatgactcaataattggcaggaggaagtgttactagctgctccacttacggcggtggtcgggaggacataaaataataatgaatatcattccccgtcggagtacggagtaaacaggtgtccattcgatgtaagtgcgttgctcaacataactcaacaaagtcaacagtattcgactacgctacttatcagagcagatattattcccgttggtccgcaaagttaatatcaccatcatcgactcggccagttagggccagttgcccaggtagtccccgagccaattaaaccacattagtcataagatacagtacactagcccgtttcaggtaatttggtacattaccgatcatcacgctcgcatcctgcaagcggtgtgcacatttgctatatacgctttcaggtagtctagttgttgtttctcgataatttgaccatggtagcccaagatctgtgaattaatccatcaagtgatatagtatgatactatagagagatcattattcggggccagctcggggccaagatccgctaaggaaaccggtcacgtgggtaaataccgtaacagcgcttgtccaaaaccggaagcgttgccatctcataccccgtcttcatgagcccttgcccctgctgttcctcgacttatcactcttcgattgcagtattattctcacttattcaaccctttccctaagtcttcggattattattagaaaaagaagcaaagggacctacactccttcaagtgactcgacgactttctgccaaagcgggacatcatccgagggtggactcctgcgcccaaaaaccgccatccactcaaaactgtcgaggggcaccgactgtttcaaagtcgcattcttattctcttcggattttatctgtgtgagcttcgcgcttcaacgcgggactcgaagaaaccctgttatctataagcctctcggatttggcgtcacatcgcgcaagaccggacagggaactaggatatcgagtcgtcaaacctcgacttggaattcttatttttactactcaaaatttggtatcagcagtttgccacgatgactggtgccatgcctattgatatttcctcccggcaaacgacctcggtgtcgccgccgggtcaacaggcgtccaatctgacttcggcgttgcaaagagcgggcaacggcgagcggacagggagcttttcacatcttcccggcggaggactcggcgtgttcaaggccccaccgcctcgcaaggaatcgatcggcgcaaccacaacacaatgggggaacgggacgaaacctatctcgatgtcgggatctgctcgcgacaaaggtcgccgtgagtcgctcgcagggagcttggtgggtgggatgagctggggtggtgtatccgttggtagttggatacgtgatgagtgagtggcctgtccggacctagaagccgcgggggaaatgcccaccctgtgttgctattgtcgcactgcatcaagagctgaccaagggaaatccccgcagtatcataatgactggcacgtcaccatttaccttccagtcgccatctttccattcctcatcgtatctcccgaagctggaagcgaattttatgcgagactttgcgtgctgcggtgtgacgttaccgacgctccatgacctattacaacactacgaagaagcccatgcgaccaagtcgcccaatcaaggccaccgccagagccagggtgaaaatcgagctgccttggcggctgccgcaatcgcacaacaacagaaccaacagcatggcagccaaggacgtggcctgcagcctgaccgcaccctggatatgcagcgcaagttgggccagaatccgtcaccgttgcagcatgcagacctagacacaatagacgatatggagttggacgacgccctaggagacggagacggctcatcctcgcagatgttctcttctcagctgcgtgagggtggacagggcggatatggtaactccaaccagcagcagttaaatctaagtatgcttccaagccaccaaggatttaacacaccctcgcaacctggtacaccgattggatctggacgacccctttcactgcagaacaatccgactgtttcttcagtcaacacccccaccttgatggccaacccgctccaaaattcgcaattccgaaatacgcccgattcatccggaccagggaccccggccgaaattgacgaaagcatgatgggtgggttcggtgatctcagtatgcaaaataacaccatgggccaaaatcagaatcagtttggccgcttcaatgggaacaataatgatatggtcgatctttgcatcgacgagccggctaagcggctgtttagccccagtggcggtatgggttcgcccaacgcccactttaagctcagtggggctcagtatggcccgaatagcgatattgcacgacggatccgcgaacaacagttgctcgctggggtccccgacactactgttattcttcctaacgaagaacccaagccgttccgatgccctgttatcggctgcgagaaggcatacaagaaccaaaatggactcaaatatcacaaagctgtaagcttgatctccccctacattcgatattatttttctaaccgctcctttttttcagcatggccataataaccaacaactacatgataacgccgatggcacgttttcaattgtcaacccggagacatcagcgccataccccggcactcttggcatggagaaggaaaagccctaccgctgcgaggtgtgcggcaaacgttacaagaatctgaacggactcaagtaccataaatcgcattcaccaccctgcaacccggatttccagcttggaggtcgtaacctcgccctcggcggcggagtcatgcacgggcagaacatcaacgttgctggagctggcctccccggaattggcgaagaaggtcttctatgaacccgtgaacaaatatgtcattatgtcccatacataattcctagctaattgacgcgaacgatctcgacggctttcaggggtgaggcactcctgcacacgatgtcatgattttgaattgggtccggtgactttggagttattccttttctttttctctcttcgaaaattgttccttttggcttacttattgactgtgctttgtgatgccctgcttttgcttttcgttctgctgtccgatagattctactggcatgatggttttacccccacgcttgatatccctcgccgttttcagatctacctacttggcctggtaatagaggaacttttgagcgctcaggaccaagatcaagaccgtctctcaccaaagagccgtctagaagagacttgcaattgcctgcttttacgctctgttcatcttgttttgcttatacggcattcgcgtctttcacgggagacaaattagaggaattggatatctcccgaaactccccactcccaatcctgctattcatttgcttttgctgcgtccttggaaagagcttcgtgccttgttttcgcgttcgtgcccccgttctttgcgttcagtgtttttttgctcatgtgccattgtcgccttgggtacctggaactgaacaccatcaagatttggaatctggcaagagatttgaccggtccatctggtacgtgtgcgaggtacgagttccaggtgtggttacttctctcccctctttcacaccgagttggtgttcgctttttcttccatgctcccttctatctagggattggatagggactggatttgggatttgggatctgggatctgggaatcttaaaagtgatttctcggcgttggatcgttgtagatatggattttttggatatgattcttggctctttttggctattgttatttatcttcttttctttccccttctcttgctatttattcatatttttgactttattttcggtttcttgttattgtagatccgcgttcgggactaagacttagtctaagggcttaactagcaccttctatccaatcaatgttatttttgtctcgtctgctaagcagtaatgggagatgatactcaggctagtggaagttgttcagagtcatagtttcatttgtgcttattgtgaccagtaagatctctttcagtctagtacaaaaccaacctcgaaggcatggcaagaagcaaagagaagcatgtaaaaaaaaaagcaaaagcagaacccaccctcacttgtaagcgccacgagaagctagaaatcaaagaaaaaagcgtagtaaaagacccggttgctgaccatgtcgatatttgggtagtgagaatcatgaaatatttcgcttgcacaaaccgtttcgagggcgtgattgaaaagacgtagggattggttttcgtttgtgccatgagatagagcacatgtaaggggagaaaaatgttacagaacgaggaaagaaatgtcatcaatggagatcggaagatttgaaaaagaaacaaggagtgatggtgtcatttcgactaccattcgaattcaccctggcccttgtggaagacgtatctagttcggttagtatatgcataacgtgggagagtgggatgacttactctttgccaccagtggtcaagatgccatccttcagagtgcacttccacttgttcttcacgcgctggactttatcgtatgtgcaaagcatgacctggccctccgattcatctgcgtcatggtcatcggcaacgaggtcatctggatcatccaggtccgaattgatggcgtcttcatcttcctccttgatatcgtcttctgcaccatcaaactggccagtgacgcggggggtagatgaaggtgacccgggggtatcttggctgagaggagctgtgagagccacacggcgagcgaccctagaagaggactcatgctcttccaagggacgaaggagaccaccggcctcatactgagacatgcgctgcttgagatgctcgcgcagaagtcggtcaccttctccactctcggcagctgctctacggcgtgctacctctgccttccagtcggtcaatgggtcacctccaccatcagtctgtccaggacccatgtgtgggtaggcctgttcttgtttgatttgtggcatttgcccatgggcattggggtgcatctgcggatatccttgtccagcttgggcctgggcttgcatttggtggacggagttggcggctgcggcgccgtatttctggtgaagcgcatttgcagcacggtcgcgagccgactgagggttaagaccatgcgggggcatgggtgtggtcaagtgctgcattccgggttggccgttggatccgggctcggtcttgatgcgaggcccacccatgggaggcatagtgtgcgagggcgcaacttggggaattgaaacaggctggtggacatattgcggctggggaggttgttgtcggggaacgttggaggggacagtggcggtggggaggggaacagagtgctgttgagcaggctgaggagcaggatcccaggggaaatgagcgacgttcacagaagaaagcttgtgttgccaggtctgtatagatattaattagtgtcgggtctgctgtatgagataatcaagaagagactgagtcttggcggtctaaaagcgcctaagcgggtatgagcggcacatataaagggagcactcataagccggtgtccccccataagcaccgcctcccgcaccacctcgcccatccccgcttttggggaaatcatccacaccagactttgacaacacaagatagacaatatgggtagggaaatatgctactaacctcacggagatcatgcagagtctgctgatcgacaccactttcctcaaaatcgacctgggaggcatcacagacctcctggatgaccttctcgaacaccgcaccctatgaaggcacatatgtcagctcttatttcaatggaacccccaagatggattgggagaacatggttatgagtcaagagtaagtcgctatgcgagcgacagctgggaatagacaggtggtcgccagagaagagttgggacttaccacttgctggttggacatgattgctgagtgagaacaggccgatgagctggtggatgattatgcgaagggatcagagagctaggaataggtgaatggtgaaatgtactaggtaaggatagcttgactaggaagtaaagtgctccgtcgcaactatcaagttgctgatcgatcacacccacgaatgacgcaataggaagcaatttgtgaatcgatagtttgcacacaaatagaaaagagaagaaatagtctgaaagacaagtgccgcaagtgcaaatgtcagaggaaagcaagacgatgagtttcgcgatgggttagcgaaggtgaaagtcacggctctgcggtcgaaatcccactgtatccctgaggcttagtcatcggcgactaacccactgcgcactttcaagtagaaacggaagtgaattgaaagatcagagaaagaatacagatgaaagagatgatcatggacgagcaaagtgaattaaaacagtcgtaggaatggcatttggacaatttgtacagccagtttacggaaaaatagatacagagaacaacaccatcagaacaccgaaatcttccaaagaaccattacaccgacattaatgtcccggctcatcaatgctttcaatatcacaatgaacaagggtattcaacaaattaaagcaaaaaaaaagattttccagtcctttagcggatggtcatagacttggtcatttgagccttgctgccgacaccaccctcacgagaggaggaggcactgctaccggccttgcgctcaaagatcttccagaacttcaggctctcatcagcagcagtggtggctagcatctgtccatcagggctgatagcactgtggaggacacgagtctcgtgagcagggatctcgacgttgcggaccaaagttggatagctccagatactaagagagttgtcggggaagccgctagagctaacaatctcgcggtagtggttgctccaacggagagaagtgacttgtgagccagtgtcaatgctgttggtacgggcaccggtggtggtgttccagaagtgaatgtgacggtcgtaggaaccaccgccagtggcaagaaggttggattgccatggacaccagctcaaagccttgacggcggcgcggtggttggtcttggtgaacttgggagcgctcagagaacgagcatcccaaatgttgacaaggttgtcatttccgccagtagcgagctgggcgccgtcagagcgccattcgagaccgcagacctcagaggtgtgagagaccagttcagcgatcttgtgctctgcgatgcgaacatcgtggttatagacaagcccactacgggctccagtggacagagtgtgcttattccagcccataacaccgacgcgggagtcgtggccgtacatgctgcgaagcttagaaccttcctcaacgtcccaaatctggacctcaccggttcccaagccaacgccaacgtaggcaccgtcaccactccacttcacgctgctgacgtatgtgtcgggggaggtttccaaaaggcagttaacagagccggactcggcagaccagacatagacgtttcgctcgagaccgatggcgacctggttaccagagctccagtccagcaaattgaggtagtagtcatccaaaagaccgggggcgtccaagacccgttcgggcgcagtttgaacacggcgacggaactgggcagatgtagatttggcaggtcgcaggggacggttatattgagcacgaagatcaataggcttcgatgactcgggagggggaggcttaaatgcgaggatgcgagtgttcatgttcaccccacaagcttcagccagagatgatttgtaggccacggcatcgggagccgggcgtgtgtaggtaggaggatcattatcgtctagacccaagctctccaaagcagcagttaggtcatcatcggatccacgcgtgccaatgtcaaaagcgctgactgccgaggcgaggactgatgatccatcagccgcaccgctcttagggcgctgtttctcttctggctttgcggccccgctagtagccaggccctcacttgcggtccggttgggaataaaacggtcaccagcgttgtgaggaatgcgcacagttgtcttgctggtacgagaccgggtgggaatctcccggcggacatgctccttggtaggagtgttggctgtggttgcacttgtgccggtcaaggtccaatccgagacaccgagctccaagtgcttgggtgatttgcgggtgcgggtgatggcaatgtttgacttgttcgacttggtcgccttgggagattcacggtgggtggtgcgggctgcttgagctgcttttgagatggacttggcgaagtgggcagagaggtttccaccgtataccgacttggtttgactgcggccagcctcggactggcgaggaggaggggtgaagggtgacgagtggccgcttacgcgggggttgggcgaaggactcagaggcatccggcctccagcggtcttggaagagaaaagcccatggtggctcttcaccggagttgacgcagtaacagaggccatggtaatatatgatcagagtagatgtaaaggatcaaccccaatagaagatgcaatacgaatcaatgcagaccaacagaaaagtatgcaattgagaatagtgagattgaggaagaaaaaggaaaggaggtcaggagacacgcgaataaatagaaggtagctatggagtactatactcgttgctgaaaagtattgaggctctccccatagcaacggttacctgagctacatagaacgctaacctgtattgggactagcgtcgacataccacgcttgcctttttgggtgacacttgtcttggcattaaattccatgccaatagcctcttaattaggcaagaacaaagaaggcgagaggctatacagaatatatgtttgatagacctcaaatgaagaaaatgccgtgacctacggtgccagttgcggatacaattcatagccccccttttcgccactgggatggcgcattcatctcctctttgcaacccccaccacgctcctctcacccagttccaccgagacccaccacgacttctccctggtcgggatcttcgaggggttttaagccgatatcctgctgtactccctctatggcaatgcaggacgcctacctgatgcctaccagccaggccggcggtcgtcggaccagcgccgattatcgacccagcataaaaaaggcccagggccatgtccccgcgtgcctggtcaatgcctcggtgacgtactgcagcaatgatcgcatttatgcgttcgggggttttgaccagtttactgatgaaggttcacatcaccttaagctataattctaaaatggcactaatgatttttagtttacaaccacgtgctccggctggacttggagactttgcgctgggagctcgtggacaactatggcgatatccccggagttcgcatgggtaatgattctctcttctcattcgtccatgtttagtgataaacactctgactggaaatcttattttttatagggcatacggcgacattgtaccaaggggataaattgattgtgtttggaggcgaaaatgagcatcgcgaatacctctccgacgttgtcatccttgatctcaataccttcacctgggcactccccgaaattcgcgggtcgatcccgcgtggccgcgcccgccatgctgccgtcattcacgaagacaagctttttattgtgggcggagtgacaggtgtgggaggcgtgacaggggagaagaatgtgatattggatgatttgacctatttggatctacaaacatggacttggtctcggacatggagcttcactgctcgcttcgatcataccgcttgggtttggggcacacggctgtggatatttggtggattgggtccgaacatggaacggactactgatatctggtggctcgacctcaagggatctccttcgttggctggaaacaccactccccaaggtagcgtcaactccctgggcatcaatatttcgggggcttatctcccagactctatatctagtcctcatcaaatgtctccccgctccggaatctacgctgccaattcaggcagtgtgcaggtacgcaatttgggtcgacgcaagccagtcgcgcccggtgccatatcttgtcttaggtttgattctggtcctcatgtcccctccttgttttctggtactcattttcattcattcgcctctggtgtcctgctcgacctaatcacgccgtcggagaccgtacggtcgcatgattgtaacctgtcggctctggacctcaactcgctgcgctggcaacggctggctgatggtcaagagatctttcggccgggatatcgatggcactattgcacagtcaatgacacgggtaccaaagcatggctcttgggatgtagtcttgatatcgcgaatgtaccaggcggaagcgacgagaatcatatgagtgaagtcctgactatcgatttggaaaagtatggtttactaggtaacggactgtcgtcagaaccccccgaacaaggcgcaccttggccgtcagatccaatgggctcctctcaggtttccgggctcgggaccgatctagccgctgttttcgacgaacctcctgagtctggaagtggtacagactttgtcatcactgctattcgtgacgatcatgacgggtccatatcggaagatatgggcgacacgccgtccgtttccccaacccagacccagccgacctttgtggcgcagaaccgctggacctcagagcccatccatgtccatcttatcattctccaggtcaggtggccacatttcaaacgcctgtactccgcccagatggctgagtaccacaccaagcggatgcacatccccgagccttattctgtcgtgcgcgcgtttctctactacctgtacacagacagtatctccggccatccagactattgcttgagtgccatcgatgtggcgggtatgcttgttatggccaatctttatgacatgccgaagcttcgtctgctgtgtgtcaataggttaagccaagagcttgacgtagacaacgcggccatcatttgggaacgtgcggggcggaccaatgaacactggttgatgcgccgagcagcacagttttgcatgacatactggggccgtgtggtacggacagacgggtttaaatccctcagccaccagagtttgattcaactctgcgaagtggtggatacagaaggtcgcgtcttcgcagggcctgaattggagatggtcacattcggagcagattgcctaagtgaccgagataagacctctcgaatgcggctgggatctactgccgatgagatgtccgaggccgacgcagacgatgaagggatggagatctcatgaattgcatgaattgcatgaaattgcgaattgcacgaatggggcacgcattatattccggagttcttggcggatcatttgtttattaggttgtattgtatttacatccatctctaccagttttgaatatacttcttccacttctttgtgatcggccgttcaaccgctctagggctggcgttgagcccattcgtcatgagatgtggagcctctcgacgctctcgacgcggacctcagtccggatcgcggaggtcattcctgtcacgataaggagctctccatagtggtagactcactggatttcaagaagataaaaattaaatagaattagataaatatcgatgtgcgctcgaattaaacaatcggattacacggcttctacagttcctgctttgattaacattcattcacgtcgccatggaatctaagcaatctactcttccctcggatttcctttgggggtttgctacagccgcataccaaattgaaggagcagttaacgaagatggccgcgccccttcgatatgggatacattctgcaagatccccggcaagattgccggcggcggaactggagatgtagcttgcgactcatatcaccgcacacacgaggatatcgccttgttgaaagaatgcggttctcaggcataccgattttccctttcatggttcgtctctttgtgttccttgcctcgagtttcaatctttggaaatattttaaccagcttgtcaaaatctataggtcccgcattatcccactcggcggccgtaacgatctaatcaacgagaaaggcatacagttctaccagaagttcgtggatgatctgattgatgcgggtatcacacccatggttaccctcttccactgggatcttccggatgagctcgacaagcgctacggtggacctctcaataaggaggaattcgttgccgacttcgcacattatgcccgtgttgtattcgaggcctttcggtccaaagtcaagtactggatcaccttcaacgagccttggtgcagtagtgttcttgggtacaacaacggttccttcgctccgggccacacgagtgatcgcaccaagagcgcggtgggagatagctcgactgagccgtggattgtcggtcatagcttgttagttgcccacggagctgcggtgaagatttaccgcgatgagttcaaagaacgggacggtggtgagattggcattacgctgaacggtatattcccattcttcctgcatctacggagccgtttactaatcagaccatcgactaactaggtgactgggccgagccctgggattctgagaacccagccgatgtagaagcctgtgaccgcaagattgagttcgctatatcatggttcgcagaccccatctaccacggcaagtacccagatagtatgatcaagcaacttggcggccgcctgccaacctggactccggaggacatcgcccttgtccagggcagcaatgacttctacggcatgaaccactactgcgcgaacttcatccgcgccaagacaggagagccggatatcaacgatgtcgcgggtaacctggagctcctgctcgaagacaagaacggcgtgggtgtcgggccgatcacacagtcgccttggctgcgaccatctgctatcggattccgaaaactgctcggatggctcagtgagcggtacggctatcccaagatatatgtcaccgagaacgggactagtgtcttgggtgagaacgatatgccgcttgaggagctgctcaatgatgagttccgcgtgcagtatttccgggattatatcggtgctgtggctgatgcgtatacccatgacggggttaatgtgcgggcgtacatggcttggagtcttatggagtatgttttgagcttagttcctcgatggtatatatccgactaacttttttacttacagtaacttcgaatgggctgagggctatgagactcgcttcggtgttacttttgtcgactatgagaatgaccagaagagaatcccaaagaagagtgccaaggagattagccggatcttcgatgggttgatcgagaaggtctgagatagatgcggcgctgattgatatttacgctggtagactccgaggactgctatgatacctagattctatacgaatttttgaaggcctatgatattacattctccagttatgccgtgagctgtattgttcggtacgcagtatagaaaaacagagatgaaaggaggtacagtatgaagtagctgcccttgtggactgggaagcggttggatggtatcggaatactcccatatcttccccctcttgcagtggattgacgattggccaggatatgttgagaagattgtcgatcctttgccgctggaggatgccatgatgcgggttgtctttaatgatctagaattttagagcgagataacaacacttgtcgatcacaaaggcttgattgtgatttgctcaagctcaagtcacggtccaaactagagcttgatagccagggattcaataatgctccaagcttgattttatttaccttaaatgagttgattaagccttgccagagagtaaagctgataattcccacaatataattgatagtgatcgactttcgcgagtctatcatatttatgaccgaggccgatactttatcttcctaaggctaaagttcgtggaacggcataatttcgagcagcgggtaaagatccattagaagtgactccagagcaactcggaagtagcctggatattctccttcttcgacctgacttccatgatcaaacgatacatccaatacatacacccacggcaggtcggttgccatagagtccatagcaactgaatcgacaaccagagacacaccagtgtcaagtctcggagcgataccgttggactccttgtactcatagtattccctacggcgagaatttgtaaaaagccatcatacgacctcccgagcctccgtcgtaaggataggaatgagatcttactgctggatctgtttatgtgtggcgccttgtaaatccttgtcttcgtagcttggcatgaagcatttgtcttcggcgttcttccacccgcggattttcttggtcatggtttcctctatgcgcgcgtagtctttctcccactgctcccagcgttattgaccagagtaatcggttcggaacctgatatatccaaagtcatcgtatccttccctttctactacctgcacaacgaagtcgacactttcttcaaagagtggcacccccggacaaggtggtaggccccgctccacgcggagtctccgtcgatgttcgttgtggattgcacggccgatcactattcggacttgaacattctcgacagaaactaaattcttatcaatctgacggagttcctagacgatctgtattgaaaggagaaataattccttgttttagtggaagaaatctcaaacatttggttagatcacccacttcttctggtatctcgcgtatattatcaagcagtttgaagtcgctccagggtccatcctggcggtacacaagacatttcggggctgagaatcgcagacgtctcagaaaataaagcacatagattgaaagaaaagaacgtctatacaacataggaaggagtgtgggaaagggaagtcaagaagaaatggatagttggaagcagtcacgggtcatgaaagcttagttccaagggtcaaagaccctgaactggagcctgggctggagcctatgctagtgcctgggaagatatcctaagcccaaaaaggcaaagatttattttaagcttctcccgccccacttccgagccgaggcatcgcgaggaccgttgataaaaccggcggtgtgcagtaaatacccggcggtgactacaggcaactggcagtaatagtagccgcactccgttccttcccttttgagttcaccagcatggatatatctcagatctccaagcagcttttaccagcgccgaagagattcccagactgctgcttagccatctccagcaccttaatcacctaccttgcttcgctcctccccgaaaagcctaaattcactatctcaatcggcagcggatctggtctcctcgaaggtctcattgtgcattacgacaggaatgtatcagtggagggtgttgaggtggattccactattaatcggtacatcgccgaagaagatatgaatgttgtcggcggaggttggggtctctggtctgccgcccaacaggcagcggcgtggatgtttgtctacccacgcgacccaaaactcatcaccaaatacattgataattatggtggtcaaaatgtggattttattgtctggcttgggcctcgggttgattggccagactatgagacgcggttttgtcaatctccattctcggagttgagttttccagatcatatcggattaacaccatatgagactgtggtggttgctagaaggccatgttgatatgaactctgcattttgacttgggaagattatgttatacgactagtagtgcattggaaggctttctgttttgtaattgagtcatggtcccttgtcctagttagattattactatcacgatgtcatccctggattaataaagaccatatttgcttgcttcatttcttacagaacattatcagagtaaatcatcatggaatattgccttccagtctcacatagtaattcatacattaaatacaaagcccgtggccaagctcaaagcgcatacctgaaatgtttggactccatatccgtcaagtccttgaatccatccaagatagcctgagaggtgatgtcctccggagtttcatcactaccagccgcaacagctgtagcatctctccttctattctccattttcatcgatatatatgtcgcacatgctagaacaatgatgcccgcatagcaaatgagcaggcccagcagacccgagtaatagcgcggggcctcgtcggcgaagaagatgttcgctccggcgacattgccagccgcatatagcgagaaccaaagcccattggcgaccgcacgcttggtgtggccggctacattggtagcaagtaggttccacgagataataacgggggcaccaataatgtactgcagccaggtgcatccgactaaagtccaacggtggtcaaggctggtaaagcggatacccagaaggccaccgaaggggattagagaaacgactgcaagcacgatgcagcgggaatctttaacgtaggtggcgatgataccgcagatgggaacgactacagcttcaatcgcgccggtgggtagttggaggagtgtagtgtagatcccgctgaagccatagcccttgatcaaggctgatgcgaaatttgatgagccgccgttgataacaccgcaggcaattccgactccggcgcagcagaggactctgaaatcgtagagaatctccagcgcctggcgtggtttgatctctcgggtcttcacaccgatcatgttttcggcgacacgctgcacggcaatcacgcgctgtcggtgggtcaggaagcgggcagagctgggcgagtcgggcatgagccagaggaagatacaggcagtgaggaagttgagtagtccgatggtcaagaagatcaactgccagctgcggagcgcggtgttgtgtgaatggccgaggccgaatcctagtagggcccctaccatcgtggccatgccgtttgcactgagccagacagccatgcgcaatggctgctcggagcgcttgtagaacattgatgtcaggttcatcactagacagaacaatgttagtccttttcgtgtctctggtttgtgccgtggtctactcactgcacggactgactccggcttctgccattcccaggaggaatcttagcaccaagattcctccgtagttcttcgctccgacgtgggcaataacgagcacactccagatcagaagcataccgcccatatattttgcgattggcaatcgttggattaggaggttggctgggagggcccagaagagataaccgaaattgaaaatcgccgcaacccatgaatatcgttggccttcaagaccgagatctgggatcaaagagtatgcggatgcataattaagtgatagtttgtctatatagcacgttagttatagaattaacaataggggaatgttcttgcataccgaggaattgaataacataggtcaggtagagctaaaaacacgatcaactgtcagaaacaacatcaaaatattatatcacagtcacaactcaccaccggcataaccctccagtcgagaatcctcagcacctcggcgccctcagtctccagttcctcggcagtcagctgctctgcctccagatacagattcgctccgatatcatgagtctcgccgagtgccacatgtgtgacatccttctccgcagtggagtggtcctcctttgtgtcgttggggttcattgtaagtggcgggggtcaagttgaacagaactgggccgtatatcaacgtccagcgctctattatataccccgcgtactttttcagccataacttgctatcaacgccaagcagataagcaatgttctttctttatctacaaagctatctttggtcaggtcgatcgttggagataggaagatgagcggccaatagtccgcatataaagtgtggggtaagcggactattctccgctgtacggggtcatatacttcgtcctgtctagatcactcgaaggcatcagacgaaaaggaaccatatcactcgcatttcaaactttcaaagcactcctcggcatggctcaccaatcccaagacttatcgctcctggacgccagtatctcggagctccaatccgcactctcttcaggattgctctctagtgtgggcttagtatcacgatacctacaacgaatcagcgtctatgatgcaagtaatctaaagcttactgccattccgcttctaaacccagccgccctcgatgaagcagccgcgtccgatgcttggcgtgcagctggtctgccgctgcgaccgttggagggtatccccttcctcgcaaaagacagcattaaagtgaaggggatgaccgtggcgagcggctcacctgcatttgaaactctcgtcgccaacgaagatgctgcctgtatccaactcctccgcgaggctggcgccgtgcttctcggccggacgaacatgcccgccatggcgtacggtggtatgcaacgtgggtgttatgggcgcgctgaaagcccgtataatacagcatacctggctgcggcgtatgcatccggttcatcgaatggatcggcagtcgcgacgacggccaacttttgtgctttttctctaggcagcgagactgtttcttcgggtcgctcgccggcgtcaaataatgccgttgttgcatacacgccttcgaaaggccttcttcctctccgtggtgtctggccactctacttgacttgtgatgtcctagtaccgcacaccaggactatggcagatatgttccacgtcctagatgttctagccgtgtccgacaaagccccgacgggggatttctaccaggaacaaaaactcatctccctcccttcgatcgatacactccgaccacagtccttttcaggattgcaagacggcacatccttgcgcgggaagcggatcggtgtaccgtcaatgtacatcggaggcgataactgttctctatccccagccagcagagtcaacacccggccctccataatcaagctatggaaaaacgccagaaaggccctcgagtcctgtggcgcggaggtaatcgaaacggacttcccaattgtgacaacctacgagtcaaacgcagacaagggccagctcgtcaccgtcgcaggactaccagaaggatggtccgcgctggagcggagcgagctcgtcgcacatatctgggatgacttcctgatcaacaacggccaaaagggtctcgatagtctttctaaggtcgatccgacgacgatcttccctcttgcaccggggtctctgaagggtgcacccgatgcggccaatgcgctgcggtgggacgagatggttcaatacccgcaccggaggccggcgtctgttttcgatatccccggtattcagcagggaatccaggctcttgagaatgcgcgcaaggagacttttgaggactggatggatgggcttgggcttgatgctgttgttttcccagccaatggcgatatcggagctgctgatgcggactgcgatgaggcggcttcgctgtttgcgtggagtaatggcgtcaagtactcgaacgggaacaggcctattcgtcacctcggtgtccccactatctccgttcctatgggtctcatggaagatacggggatgccggtgaaccttaccttcgctggaaaggcatacgatgataacagtctgctcaagtatggcttttcttttgagatggcgatgaagggccgtgttaagccaccgcttgtgcctgctcttgactctgatctcatcaagggtggtcaagatcctcggccatgggcttctcgatcgaccgttgagttggtagtggagactcaagtgaagaagattcaggactccaccgttgtggttcaaatccagggatcagtggtacccaaggactctcaactggagactatggaatgccatatcaacggtcaagtgttcaagccggccatagagggcgatagatggtttatcatagcttcctaccctgcatcggaacgtgatcaaccctggaagaggtggtcgagtcctgctttgacacagactatcatagtcatcacagctcatacgaaggatggctcgacaacgggcaagttgatcctactatgaagacttagtgtcgtcaagaaatgtaactcttctttccattactccattatatagacctcctgaaataaattacaaagcgctcatatttacgacatctctctataatcttcctctaaaatgtcctgatgtatactcctcccatatatcatatcttcaatcatccccaagacagctcggtgtagataactcttcctcaactgctccaagtgcaattcagccacttccagtggtattgcagcactagaattagcttcaaatgtgccagaatcccacatgatcttctgtcgtacgaactccagcactttcatatatggcgttgcgtcgttccaccggtcgacaaagccagctagattggctgcacatgtagcaatggcctgctggttgttctctctgatacgctgttgatcccgaatatcagtgattggggttgtcgcccagacaatgtaaagcatcatgattcccgctcggaattggaatacaagctaatgatgattgatggttagtcaaaatcacatcgggtgtacctcgatcggaagaaaaagcagaatttcgacacatactgcagaccaggtaaagcacatcacatgtccttcttcttgcagcagccggaaattgagacagacctccgctatcgtcgcgagaatttcctctattccgtccatctcgatgagatcgcctttctcttctatcaggatcaagagactgtaaacatacagctttcgcatccatataggatggagatagccgtgttggtcactgtctaattcgtagtgtggaatctcttgtcgccatctatcgagagcggacttgaatgaggaggtataacctttaccatatctggcgaggggatttcggggtcggttctcccgcgttcttctgatgctggcttggatcttgcgtagtcggaacaagtgtcttatagcggggtttgtgcttagggttggttggagggtatctcccagagtgcacatctaagtagagaattagtgactgtgaaaagcttagaaagttgggaataactcacgtcatcgtcaacaaccctgtaggcagccgacactggtcggtcccaccctgaaacaatgacttcattgagcatgtagcaagtaatgaacatgttctcagacaaaacctcgctaaattcggtcatggatccattgtcgcggcatatcgatacgtgcttccggatctctgtcatggcagctgtacagaaaggtagcacagaagagacgctcgttatgatgtcttcggaagaaggagaatgcatagcatagagtatcatgaacagtgaagcttggatttgcaagaccatagacgaatgcccgacaacatatgggtaatatctcatagccgaggtatgatactcctttgaccgaacggagtgcgaagggtctcgttgtaaaacattgcaaagggatgcaccaatagcatacaccatctgcagaaagaaggctttccattcatcctgcccttccaggactgcctcggcatgccatgatttccaagctgtttcgttcaagaagggccactcgcggtgagtcacggagaaaaacacatttgtatagagctctttgagccaaggggcatcgtcatcagtcaaaggatacgagggtgccaggtcaatccaggggacgtcgaatgtcgtctccgggaataaagagaacgcgtcaggcgagaaagatgatggatattttcgcggtgatctttcgctgctgtgttgcaagtctggcagaagcataaaagagccgtcattctccccgctactattctgctcggccatcaggtagtccgagtcattgcctgtattactgcgcttgtgttctgggtcttcaaaatccgtctggactccagcatcacatgtttcgaccgtggtctctataacgctagactcatgatccagctctgcgacccgttgctcgagttgtttcaagtattccagcgggattgtgatgttatctcccatcttccgagaccgagccggcaagcattcagcgcccttgcgacggcattcgccacatgaaggttttgcatgatcacatttccgcttgtgacggaaacagcgatcgcatgctatttctctgtgcttgagagggcgcgacatgcagcaattgttggacacatacagggagtgagagggaatgcggggagactcgcgataacggatccgcgccggtacgatatcagtcctttaataagttgctgcagaaggaaggtctaggcgatgataagaaatgtttggttgattatatatcctgcttgtgttaagtataacattgtaagagatctgtcaagtcaggtcaactggaaataaagtccatggataacattcatattcgtcccatacccgcgctcactgtcagtcgacagcgacaatcagattttgatccatctttgagccttggtatcatatccgatcaacttaggatcaacatgtagactcttgagcatgaactccattgtgaactcctgggtaacaatgtcagcgcatagattccacccaaaaccacagtaatatcacaatacgtacttgatcctggctctcctcatcatccttcttcaatggccagccagaagaatcctcagtcccgtagttatcaacgtctccctcgtcctcatcgacatcctcccgctcacgattctccccatcaaactcctcccaccgtgtcgcatcacgcttcgaccgctctttccaagccgccatccctcccatcccatcaaacctttccttggcaccgacaaatacctcatcggctgcgtcctggctggcgagccgccatttggtgatgagagttggaatctcgatgtatctggcattcgtctcgaggttgtgggcctgatttgctgtttcaagtttggtgatgagtgcatcgacctttgactggatctcgcggtgctgcttttgcagttctagaatctctgggtcggtgctttggaatgattgtaaagggaatgaggaagagattcgtaccacgcgcttgcgcttagggggtactagagttgttgctagatctggtgaatttgatgttgagttggactttacagtgagggtaggagtcgctagaatttgcgtgtcctcgagtgcgacaggcttcgatggcatgtcgtctatctttgttggtgcaggtctgcgtagcggggacttgaacggctttgagagagcggtagctgcgtcgatgcgacgacgtttaatagacggcttgtccatgatgcatcaattggatacagacctcggaatttcgatgtgtttaacgaggagaaagaaacatagaaaagttggagaagccgagtgagatgcggagatgcgatattcttatcgataagcaaacagactatttatctacaattctagaactcctcaatgaccaactcctcctgctacccattgcccaaagtcaggttcaccaggctgagggaataatccacggtcgttggcattcccatctccattcggggcattggcgttagcgttggcattggcgttctggttctgtcggttgcgctgctgctgctgacggtagtataccaaaaccaacagcgcagcagccagtccgacaatgaggagaccctcgagcattccctcgtcgatatcaaggtccaggtcatcatagtagccatcttcgtggccttcggattccaagccacgatattcatcatcatcaccccgttgtagttcataaaggtcttcgtaatagccatcctcgtcgttctcgatgaaagccttgacccattccttgaaggtacgacggggcttcgagtctagtgataaacgtaagtaagaaactagaacgcgattaatttcacggggtaagagcgaaggagcagcttaccttcctcctcatggatggggttaatgtctccgttagtgatgcgattccagtatcctcgagcccggagtttgatcaagctgagcttcactggcagatacgcttcggggctgaggtcaagagccaaatcataatatcgcttggccatgtggaaatcctgatctactgccacgccattctcatgcatccatcccaaattccagtagccctgggcactgtggtgggcttcagcagcattgtggtaacaggtcgaggccttgtcggcatcgataggtgtaccagtaccagacaggtagtagtcacccatcttgaccaaagagtcgatgttggcttgcttcgaagagcgggtccaataaatcaaggccagtcgcgcattgcgcatcaaggaggatcgagccttctcagcccatggaaggatggaatttagtgagagtacggagcgatgctcatcaagcagataagccacatttgcctgtgcattctcatagccttgctcggctgccatcattgacggaatgagagcgccctccttatcaccggtttcgtaagcagcgtttgcctccacgaaagctgagtggacgatctctgctttttcggcaaccattttatagtaggcagcggccacaccacagtgacgctgtctgccaataccgaagttggccatctcagctagataatagtacgcctccatccagccccagcgggcggcaagctcgaagtaacgtgttgcggttgccacatctccttggtccaagaacagagcgcctaatcgtgattctgacgcaggggaatcctgctctgccgctgctttgaagtagtgagatgccttgaaggcatcctgcggaacaccatagcccttgagatacatcagacccatccaatgctggcacatcgggtccccgttcgtaatacccctccggaaccatgtgagggcagtcgggaagtgttgcttaacaccctctccgcgaaggtacatcaggccaatatgtcctgcggccttggatgccagtttatcaagccctgcaggggggtttgagttgacggacccatccttgttccaatatttcttggtaacaaccttgaaatgcttcatagccagtcggaaattccgcggcaagccccgggcgccctcgaagttcatcttaccgagggtgtatgtagccttcagttcacccttccgggacatgagatccaagtattctagtatatcttccacgctggcctcaggagaggcattggcagcgtcccgcgcattttgacccgagctcgacacactggctcctggaccgtagacaccaccttcttcgtctgcccaacgataagattctcgaaccatagacctaccacccggagggcctgagcggtagtactcgaccgccttgtccgcaaccttcttgtagtaatggatcgcatggtcacaatccttcggcgttccgataccagtgtggtagcgatacgcaagtgtcatctccgagcggatgttccctgtttccgctgcaaactcgtggtacatcagggcctttgcctggtcgggttcgaccgcaccgccgatgcccgtcgcatacatgaacccgaccatgttctgcgctgtgttgtttccgtccaaccatgctagttcgtggtaccagcggaaggcctctttgaaatcgcggggatgggagaagttgccatagaagttcatctctgctaacaagaacatagcatccgggtctcggtcttcgtctgcagctgttctcagctcctccactgctcccgtcagatgtttgtttattttctgctcgggtttttcggtcgaagggcggttcaagaatagcagtcggaccgtttgacggccatagtatgtgaccgtccctagtaatcctctcgacttgtcggattgaaggactggattctttattgtgcgaagggtattccaggcattctcgactcgttctatcatcacgatgaaggcaatcagtatcaagcgtcaggcgataaggcacaagtcgtctctactcacgagtcataggtcggggttctgcttcccctgccaggaacgtgaattcgtggtctgcatcgcggcccgttgccgcggacgctgtttggtcagtaagcggctgaccaggcccagctgcgcatgtctgcaatagcactgaaaaggggtgtcagtttccgatgcgggcctgcaggtgcgggcaaatcttacgcagggccgagagaaagtgtgagagcggcgtcctcataatgcctgcaaaatcctgatgtagtgttggagtgtgaagcacattgcgactctcagagcaatgagaatcacaaaagcgacagagctggggatcgtgatatgatgtagttgcagagtacgggccacttggcttgacggagcttcattttgccgagggccaatcactacatcgtacctgtgtagctttctacgtgcatgcatattttctatatgtaagatgttatatgttccgagattctgcttgtctatctcgtttaacatgttctccaattcgtatgtagctttccttagcctagactttagactatctataaaagcggtgagaatatataagctgccgaagtagagacatcttgttctctactgcatacgaattatagggaaaagattggaaatttcataagcattgttggaatctactcgtccctctggagggtgtgtacaaacgaagagaagtcaaaatacatccccggtgcgctttccatgcaataaaaaggagtcgggcaattccccaatggcaatcaaagtccgcacccctatctcacagcatccatggacagtgtcctcgattctgatcgaaggttgtgcggtcttcgcattcgcgatgggggaatagtgcgccgggaaaacaaagcaatctcagaacgatggcggctgaaaccaaactggcacgtgttgttggttaattggttaaaaaaaagactaaagaggtacaatgaatgggagacaatccccgatatcgtgaaaaaaattatcaaatcatttccgagatttgtagcgcgaaaagatcttttttgtttaatggttgagcttcaagttgatgatggtacagatgtggaacacgagcctgagacaggcaagccatcttcgtaccatattcactgacgcggcgacgttgggctgtacgccggggatgtcgggctatacgccggagaggtaggtgacgtcggagaaccagagaaattgggagaagtcggcgagtatgactgggggctcgtaggagaccaaccaggcgaggttggagtgtacttgggagaagtgggagacgttggagacaggtgccgagcaccaccaatcgcgggactagtaggactgtagctcggcgaagtcggactgaacgccggggaggccggactaaagctgggggaagtcggactgtagttaggcgacgtcggcgagaacccaggcgaggttggagagtatgaaggagaggtgggtgacgcttggccgtatgcaggcgaggtcggcgagtagatcggagacgtgggttggaacgttgggctagaagacgagaacccaggagaggtcatcatcatccgcgggcttgtcatggagatgccaggagacgtcggcgagtagctcgaagacggagagtacataggagacgtcgggctagtattgaagggactcgtcggcgagtagctgctcgggctgcgaggcccaggactgaacgcactgaaggtactggagctagcctggtactcggtgagacctccagtaggctcctggccaatttggtgcataggcgagaacgccggatcgggatcgctaccggccatgtacggggagctggccataggagaaccagtatcgtactgagtggcagcaccgtcggaaatgatggcatccttcgcgccgaccgcacccatcagaccatagcgtgcattgttggacacgacggtgttgagcaagttctggtccaggtagacgtcgaactcacccgttccggcaggggccatctgtccaaggatcaagttctcagacacaccgcggcaatcgtcgagctctccgaaagcagcagcctcgagcagaatctcaactgtctcttcgaacgaacaacgcatgagggcaccattgtcggcacggttgataccatgacgggtaacgggagtcagataaccacgaacagtcatgacatcgaccagcagagccaagtgacggtgattaacgtaagaaccgtcaaaggcaagcaccagggtcaattcgcgaagcacagctgtacgggcagcctcaataccgaagacctcgaaaatctcaataaactggttagagtaggtgcgggaggcgtcaacgcccggaattgaaaggacagcagccaaagacgatccactggtttccaaaacccattccttgcagagaggatcggacttgctggtgtggagtgaaccgtcttcgatgactctgaccttgctcttctcattgatgaaagcacggtcaacgccgggaacacctcgaagggtcaaagtgtccagcaggtgttgctcaagcttcttcaaggtgacgtcgtactcaacgtcttcatcatcgtcctccttgtagtcttggacttgacggatacgaataacctgctcgtctgcgttgttatcactgaagatgacagcaatatcacgaggataagcctgcttgattctggtagcaacgtcctgcaccgtgagacccttgtcaagaagagagcgacgactgagaacaatacggagcaaccacctcgactgctgagatgcgtcgtcggcattgtcttcgggaatgatgaagtacgactccaccatatccctatcgttctcaatgacagtggactgaatatcgggatcatagtaaatctccgtcgactcggtcacagaccgcagactagtatgttccacgagacttcgaaggagtttggcgccctccttatcgtgggtcttcataccctcttggtacacagtcatagatggcgtcttgatgtttgtggcaacgttgagaatttccttcagacggggaacaccaagcgtgacgttcttagatgacacaccagcaaagtggaaagtgttcagtgtcatttgcgtcgcaggctcaccgatagactgagcggcaagaacgccgaccatttcaccagggttggctgccgcacgaaggaaacgactttcaatggcacccagtacgtgttggaatgctagcttgttaagcgaatagtctgtgacaagtcggcggaaagcgagacgactgcggagttgcgccttgaacagcaaggtcgcattgacctgagcctcctgtgaaatgggatcgtcaccacgaacgaccaccaagcgttccaggagctgctgaacttggggaatgacctcagcggggtgcaaatcactgattgtgccctcgcgaatacggaaagtagttcgggccatttccaggatacgctggatattaataggaagctgcatcatctcctcgtcctctttgaccacagaccgcaggaattcacggtctttcagaatggcctcccattcttcgtcgaagtatttctgtacctcgatatcgccggcaatttcgttggcttgctctaagatctctgggccgagggttcgctcggggtccataacatcaacacggaatcgctccctgagcttcgcgtcggaacacttgatgtgatcgacacgctggttctcaatgtgggcaccgtcgagaccatcctctccgtagatgaactggatgatatctccgagggagtttcgcacagtgccatcatatttgaccatgacttcctcaagagccttgaccagcttacgctggatgtaaccggtttcggcagtcttgacagcagtatcgatcagaccttcacgaccagccatggcgtggaagaagaactcggtaggagtcaagccacggaggtatgagttctcgacgaatccacgggactcgggagagtaatcgtccttggtgaagtgaggaagtgtacgatacttgaagccgaacggaatacgcttgccttccacggactgctgtccaacaagggcagtcatctgggaaatattaattgccgaacccttagaaccagaccgcgccatttgaatagcgttgttcagatccttgagactcctttcggtggcatcaccggcttcgtcacgagcattgttaagagcacgagaaaccttgctctcgaatgtctcacgcacattcataccaggaagggcctccaaagtgttctcggtggcactagccgtaatctcctcgacttcctgtttcctgtttcggacggcctcctcgatctttttgatggtattttgatcgggaatggtgtcaccgataccgatactgaaaccatggtgcagcaaccagtaaccaacgatggtttgggcgccagtgaagaatttcacacaagtgtcaggaccgtactcgttgaaaatggtgtgaatgacaccaccaccactggcaccgaccgtcttcttcgaaagcataccatacatcagctgtccaccgtgaatcaagagacctccatcattgagagggctgaacttctcaactaaaggcgagccgtctttgtcaacacgcagaaggttgagtccggaggggaaagccatgctaatgatctgctttccagtccagcgaggacgaggcttgatgattgccggaggtggaatcgcaccatcccagtcagggacccacagcatgaggttcataacttgttccttggtgaggaaggtgtcacgacggcagatcttgtaaataccgcagagggtatcctggacaatacccatcagaggaccgttacgttgcggggaaacaatattcttcgggaccaaagcgagctcggcgagctcagcgcgcgcctcttcgccctgggggacgtgcaaattcatctcatcaccatcgaaatcagcgttgtagggactggtaacggacaggttcattcggaatgtggagaagggcataacgcggacgcggtgacccatcatggattccttgtgcaaagacggctgacggttgaacagaatgtaatcgccattgtcaagatggcgctcgaccttccagccatacagcagttgctgggcacccgcacgcttagcgtgacgaagatcaatgcgctcaccgttgtcgcgaacaatatatcgggcaccagggtgcacgttgggtccatttgcaaccaatctctggagcttttcaatattgtagggggtaacaacttctgggtaagtgagaatacgagcagtcgagtatgggacaccgacttcatccagtctcaagttggggtcacctgtgatgacggtacgcgcggagaagtcgacacgctttcccatcaaattctgacgcaaacgaccctctttacccttcaaacgactgcgaagagccttcaccggacggtttcccttctgcatcgccgtgggctggccggcaatgtcattatccatgtaagtggcgatgtggtactgaaggagagattcgaattcacgaatgacatgctcgggtgctccctcctgctcacagcgttgaacgttttggtttgcacgaacgatttcggcgagcttgtaagtcagatcatcctcaccgcgagcgccacttgtggttcccatcacaacgctagggcggacggtcgggggaggaacgggcaagacagtaaggatcatccactcgggacgagcgtagtcattgctgaggcccatgatgcggacgtcttccacggagatgtttcggaagatgttcaatgccatggtaggcgtaatgactttcttttccggttgagccatctcatcctccatcatagccttgctaggcttccatgttccaaccaaacagattccttccttccgaactgtgggctgggcattaccgcagccaccgtgggagcggcccttttgggggtccttcgaaaattcgtcatcatcagcaggcgcgtccgcttcacataccaggacatccttggagagtcgccagatagaatcaaagcgtcgcttgggatcacggaaacggagggcttctgtaaactttgaatcggcctggtatccatgttagcgaagtgaaccagtcaagatttgccatcccaatagggatgactaaccgtgttggccttgatctttccacagttgtggcaaactgtctccaacagcttcttgattttcgtcaaaaaacctacaggggtgccaagagtcagtatgggctgaaaagacgaaaaggaggaacctgagaaatctgttacgcaccgatatggaacaccggggatgcaagctcaatgtggccgaagtgcccagggcattctttcgggccctcttcgcaagtctcgcagttgtattgacggtcgattgtacccaggcgagggtcattgatgcccttggtccgaggccgtaaacgttgatcatcctatgaatacttagcaatcaagtcaccatagcgcataggagagggaagtctcgtcggaaaacaatgcagtcgccggtaagaaaaatgtaggagtcactcaccagtgtttcgggatattcaatgtgacacacactcatgcgcttgatctcttcgggagcaaagagaccaaactgaatttccttgatggtgcgcaaaggcgccttggaataagggaaaaacacgttcgacatgatggcgaagttgcggtgacagaaaaagtggatgaaaaaaggcggagatgaaccagtcacgtaggcgtgtcgtaaaaccggtatcagcgacgaaagccggctcgtaaatgtcgcaaaaaatgaagcgaaaggcttgctcgtaagctagaagtcgaatttacacgtagcgacgatgaaaagaaggtggtgtggaagcagctggccggctgaggccttgggcagcccttgccacgagggcgccggcgacctataggtcccgaacgtcacggagcaaaaaagaaggagaaaaagagcgctgcaaagaagatcgtctttacagtatcttgaagaagtctcgcgatgagaatgcgcgatcctcctggattgtaaaggcggtgggtggatggagtgtcggggagatgaaagggtgatgttctgaggtcgcctcactgggatggggcttgagttttccctgcacgatggttgccgtctaaacggggctcaccgctttggcagaactcggggcaccttcccaaaaggtcggcaacggcagattgactgcgccttccactatggtgaatgaaagcggtgaatggcctaggcatcaatagtaggcatcaatgagggtgggttatagatggcttattgtcaccgcccgcatcttccagattctatggctatcgacaccggcagaaggaccatgcttattatcactacgcctttcaccatattctggagttcacactggatgcttgaacaccagttcttatcctggcctttctgataggctgaggattcacctcgaattcaaatattcatctcaatctacacgcacctagcacacctagcgcaatgaatctttcactggtcgatccatttgtcctggcgcaggaataccctgataccttgacggagaagctgagtatgtgcgactcatacttctagcaatgaacatcactgactgagccaacatgatataggcagcggccatgcgacatgtttaagcttcaaccacaaaggcgactaccttgcctccggacgagttcgtgaaccccaaaccaaagaatatagcaacctgaagactaatacatgctctaggtagatggcacagtggtgatcttcgatatcgaaactaatggcgtggcgcgcaagttgcaaggccacacgcgacagattcagtctctgaggtataatttccccagattcgacaccgatcgaccgaaacccaaaatgctaactccattcccagctggtctcgcgatggtcgctacctcctcacctcctcccaagactggaaatgtatcctctgggatctcaaagacggctcacgagtccgcacagtccgatttgaagcgccagtatatatcgccgaattacacccattcaaccagtacggcttctacaattcccggatatttcaacaactaactttttctgtctcagcctcctcttcgtcgcctccctcttcgaagaccagccagtactggtagacgtctccagcacaaaaccaatcaaacgaatcctcccctccgcccccctccgaccgcaagccccagacggcgaagaactcgacccggccgtagcggccaaacaagcagcgcaagacgccaagcactcaacatgcgtaactatcttcacggcctttggcaaccacataatagccggcacctcaaaaggctggatcaacataatcgaaacgcaaacctgcacgacaatccactcaatgcgcctctgcaacggggtcgtaatcctcctccggctagccagcaacggacgcgacctcctcgtcaacagctccgaccgagtaatccgcacagtgctgatgccagacctatcacaactggggatcgacctggaaccatccgcgataaaactgcacgtggagcacaagttccaagacgtggtcaaccgactcagctggaaccacgtaacattctcatcgacaggcgagttcgtcactgcgaccacattcatgaacccagatatctacgtgtgggaacgcagacacgggtcgctagtcaagatcctggaggggccgcgggaggaactcggcgtcgtggagtggcacccgagtcgaccgatggttgtggcgtgcgggctggagaccgggtgcatctacacgtggtcgatcgtgtcgccgcagaaatggtcggcgctggcgccggatttcggtgaggtcgaggagaacgtggagtacatggaggcggaggatgaatttgacgttcacccggccgagcaggtgcatcaacgacggctagatcaggaggatgaagagccggatgctatgacgcttgattcggtggagggggacgctgatggcgttgagccgtttaacctacctgtcttgctggatatcgaggacagtgattccggagacgatgtcgttgctgttgggccgggcactatgcggcggaggacgcctgggactagtaaggagggtgccaatggggattcggagaagcctgcggctaatggggcttctaagggtactaccaggagtcggcggcgatagttccttttttgtgtgtctcacttttctttttcccttgcctccgctgttggatggctgtactagcatggttcgcatacggcggcgttcatttcttagggcggagatgactgggcgttgggcttctggttttttttttttcttttggttcttactgtagccaatgaatgtatgacaatgcagccatatcatgatgattaaaaggtctaggtgctactattttaaacagagctgtatttgtatatcttttaagaccggagagagcaataactaatagaaactgccttgacaacataactagctaatggaatctacagctatcaagtacagaaatagagagaaagataagaatacgaagagcgtgttgattccaaagagacatatcgactcatcatttaggtagcaaatggaagtgtcagaaactataggaaggtaataatctgggtatatatatcacaagccgagaagattcgaaatcgaaatcgaaatcgaaatcctggctaaagccgaaaacgccatagatgcaaagtccagcatgcagagaaagagaaaaaaagacacaagagaaataaagggtagagtgagtagagtatagtagaatagaaagaaaaagagactcgagggagccgtgggtgcatagaaagaaaagaaaggaataaaggaagaagaataatcacatacacatcgtgtcagccgtcaatcgcgcaaacacccttgagaagtcagttaaacaatgttcatagtcctgtcggctgttgcgggtggaatctataagggcaacactcttcggggataatatgtctgttctgaacaaaatcataaagctgtgctgaaagtcgttggctccggagcgaacatctagttgcagccccttgcagcagatgcacgttcaacataacgtggcaagtgcatactctgggccagccaaagtctgtgagcggcgacccggtctattttgaattcgatcaaaagcgagtgtagttctcggacaaagccagcactgtcgagatcacctccgatttgaagtactagctacccttcgaccatcatgtgggtaggatccggcttattcctcgacaggttttcgcgcttggtaaatgtgcagaaggttgtatgttttgatcttcttgtcgaacgcttcctgcttgacatcgaatgcaatgcggtcaatctgctccctagaccaagaaagaacccgactgaaaggagccaaacacatcggctggacgctctcggagatagcgagattgtaccagcgcgcgaccttctgctcgtgagaatcggggtgccatgggttcatgggcaaccccacaatctggtggtcgatctcggtgaagcccgcttcttgtaaattcctgatcgtctcgttcgagctgtgggccaggggccgcatagtagcttccgttgcatgcttcaaggtcgagtaccagctagccatagcacgtcccggttcaccatctttgtcctcaacgcggggccggaaatcgatctcgacctgctcaaaccaggcgcccggccggagatgctggaagacccgtcggtagagacttggccaatttgcgacactcccacatcccatctgcatgtggatgatatcccatgaatcctcgcccatggtccagggcgcttcgaagtcgaacggggcgtagaaatcgcagttcttcgggacattggtcggttgtattggcgcaaggtcgacgccgactacgaaggaattcgggtatttgttcgcaatctcgatgctccagatacccgttccacagcccaggtcgagaatcttggacccggtggggtgtggtgcatagagcaagccatcctcggcccgtgcaacggtgaacaatttgtggaatatgtcgagacggtcctgttcttcctcgtcgcacgggagagggtagattcctttccggtagccatggtataaccggccgttctctttgtgaagcgggtatttctcgggtatcctgtgagaagaggtcagtcatagattacacgattgagcatggagtgacatacttgtgatcggagagtatgataggagacgatcgcgacacttgagatgcgttcgaggcgtgggatgcctgtgtggccaccgatccattgctagcaaagcgagcgttcctgcgcggatctttatcgaccggatctctatcgatcaaggtgtacaagtccatcgcggaagacggttgtcgtgatcggactcggtcacttcctgccaaggagtgtgaatagtatctggagtggcctgcatcactcgcggaggttgactcggacttgtaccgtttgggcgggggtggagaatgtatgggtggcaggtgtcgcagcctggcatccccgttcgtaaacattctggcgatgtggggtcagactgtaaggcaatgtgttgctatcggcgatcaatcaatgatggcgcaagatatgtaaggcggtttcagatcgacggatcatgccaggtataaaaataaacaagaataaaagagcaaatcagctgcgcgcggcgaaaagcgcagcgtaagcccacgagcaaatgatgagctcgggttaaacgagaggttccggccgattgcacggtcgggcgaagctcagagattcgagattcccaggaaccgagcacaaatcacaggtcgatgtgcagtctcagatcaggtccaactctatttcctgcaagtcctcagaaagagaagggaagaggagggttttaaggttgtgaagctgtggtttccttcccgtcgggcccacggggatagcggggtgcgggtaaagcgagagaataaaaagaagcagacagggatgaggatagatgaaggggaatgagaagaacttgcagaacttgcagaagtacaaagggaaaagtacgacccgcgctaccggtactggctgttgggttgggtacgggcgtttaaaggatttgttcatgaatagttaggtattgacaattcattattgtacgaaataactatacggataactactagtaatcatattatattacctacctacaacatacaccacaactacaacatatgtagaccttatgcaaggcatcccagagcaatggttgaaggaaggctaaaccaattagggcttggttgatcctggtatagtcttttgctctacttttgcttcttccagttttgcttttgctttctttgcttttgcttcagtatacataattcaactcctcatattcgataccgtaccctccgtacactccgtacccccgtaagagctagatcgacgtggaccaaaaggcgacccacgccctagcgggatgcggaccgtctgggcctctcatttccagggattccacttggtgagggcccaacggagtggtaaaaggcgtcgagttacttatttggtaacttagggtaagcgtggcgctgttacttgctgtactgtattctggtatactatactaggtacactatgtactactacatatgtatcaatatctacatctctgtgccacctcaatacaacatatacctatgccctccgactcgtcatacaagtcatcttaaaagaaccaactcgtacaacgtctgcatggactgatgaatctcccctcaccgcaacccaaagccctgggttcgtggatgccacagtcgagcgaatcaagtgagataccacctcttggcagtaagctgcacctcggggtaatccatggatttattcgtttgtgatatgtaagaatgaccccaagaccactgcactgggtcctgactcgtgtcaagtctgttgtttgatttcctcccaaccctgcaatctatatacatcccctactgatatctgcgttctacgtgtcaacattcccatcaaaacgatagcccaagatgtttcccctttagaccattggcttcccaggccaccggttccaccctggcccgagcgcggatttccgttactactccgtactaataaaacatctcccggccattgttggggatctaccgagtactagccctcttcataggttcctccgtacacagaaatcatcctagcgccggtcaaaccccgagcgcggtgctctccttgcagggtacatcctctgtacgggaatatttcagagtccgtgctgatctttcctgtcattgttcaccagctcgtcatggaggattgatcgaccggcctgcgcaacccacacgcttgggactgacagaccatgggattgggcttcgcaggagtagtgcattgtctcggggggactaacatctagcgtatggagtacgtactttttttgcccctgatttttgaataggagatctttttatttcgtttcacaaagaaagccaaaggattattcttcattctatcgctatattttatattgagtacatgtatgtacatatgtacctagacagattaactagtgaattactccggactccgtaagaactacaggatgtacatcgatgtgatcgtactccgacagatattggccccacgtcccgccagaaaaaaaattctagccaaactccgaacctcatccaaacgaattgattaaatttccacgctaataatacataaaaccaaaaaccagtacacagcacatccatcctcggagataatcgatcactcggaaactaatcgctgcccctcgcatcagccacagcgggatcaccgatcaccccagagatcaaaacatttctatatcaaacccaaaaaatccagccacactgcagacaccgggactagcagctccccgggaattcaacaatgcacaccctcaaagcagtcgcctcatcgactctgtcgctgccggcggataattacatctactccatcgtgccttcggcgccggggacattcgccgccatctcgtcagatgattcgctgcgcatgtttgacgccgccgatctcgatcgcgggtccgtggtctcggctgctagtcacagcggcggcgtgaccgcgctgcgcagcttcgccatgggtgagtcgcacctcttggctacgggtggccgcgatgggaaggtgaaagtttgggatgttcgggctgggaatggcagtccggttgtggagatggaaacgggtgagtttgttccagttaagctttttttttattgttttcttttttggattttatgcattgattgcctctttgggttgtcttcgggaacctgctggcacatgtgcgttttgtgttttggtgctgcatttccgctggtcttttactgggtttcggggaatttttcggcgcttgggtgcaagggtggcgatggcttggttggggttgttgctgctttctgattaaatgcttatttgctaatacattgtcttatatgttagcgaaaaagtcgccggttctgtctgtcgcttgtaacccggagacgaacactattgttgcggggacggaacttgtctcttcgcaggcggttgttgcattctggtatgtttcatctatacctcatttttatttcttaggcccagttttatcatcgataattgcatcgggatatgtcagacaaaaacagctgtgccagacccactaactcacacagggatatccgctccccccaagaattccgcctccaatacgtggagagccacaacgacgatatcaccgaggtaagtgcacctccattaagaatcaagattttaagcccaacccaacatacccaacacctactccaaaccccacatgcagcaccagccagactaaccattacatcggcaccttgcctgttaccggtggtacacagctccaatatcacccgacgcgcagcagcatcttactctccggcagcacggacggcctagtcaacatctacgatacgaccataaccgacgaagacgaagccctagtgcaagtgatcaaccacggctccgtacatcatgccggcttcctgtccgagcgcaccatcttcgctctcagccacgacgagcacttctccgtgtacccagccacggacccagacgatgcctcgcaggagcccgagcccgtgcatttcggtgacgtgcgcgacccgctaggctgcgagtatgttgcgcagctgtgtttcggtgcgcagggaccgtatattgccgctgggaacaagatgtatgtttatttcttgttttgttttgttttggggtttttttgtattcgtgctcggaagacgaagtcggacaggcacacgtgctgttgtgtttggggtttcgtgggctgggctcgtgggtgtttggatttgctaactatgtcttgcagtgacaaccgtctcgatcttgtcccacttatttccagcccgtcgtggaagctagaccgggataatctgtggcgcttgccccgtgctcattgcgaggaggttgtacgctcggtgtatttggatgaacaggtaagttttctaatactaattttcttgttgtgtgttatatctgttggcctgttcttggctttcgttctttataaccctcgctaatgcaattatatcctctagagtcagtccgttttcacctgtggtgaagatggcttcgtgcgagcatggagacctgcagaagagagcgatgctccagtccagtctggttctgcaaaggctcgcccgaaggagaagaagaaggataggttcaagccgtactagtctgtgtactgtgtgcgggtgaatgcatctgctgctgacggttgtctgttgtgtatcgttgggtgtttggggtgggtaaaaatagatctgcaatttgatgatatgagttatgtctttattgtggaattgctgtgcgtagaaaaagttggttgttgggttagtagtctacatgtggtaggttgagatatattactggaccatgacctctgttagggtataatgttgaattgaaccacgtccattccgagcaccaatgagcatgatttatatggttttagctctggttctttttctaaatcacaaatcacaaaaaagaaaccaactttgaattgaagaaaatgccaaaaaggcgcccaggattaagctctatcgaattgtgaacgagattcataattagtaagcataaataaacagtcaatttatccctacacaacctgacccttcaggtgtcgaatcttatctccaacatttttttccgtatcaaaacttttcttgcacaagggaccaacaaccataaatcccctctcctccaattccacaacatacatacatacccaagtcagaatctcacacccaaaaccaaaaaccaaaccaaccttcaaacccattacccacccaaaccctccatccagagcaaacacaagaaccaccaccacaaaatggacgcccaagcctacctaatcaagcacggctggtccggtcccggcaacccgttaaacccaaacaaacgacccggcgcacacagcggcctaggcctaacccgaccactgctcgtctcgcgcaaaaccaacaaccacggcgtgggcaagaagacaaccaaagacccgacgaaccagtggtggctgcgcgggttcgaagacgcgctgaagggcgtcgggaacgacagttttgaggcgacctctgcgcgcgagaacaatgcgctgacgagcgagctttatcggcattttgtgaggggggatgggctggctgggacgcttgaggggaagaaagacgagagcgcgtctacgtctacgtctacctctacgtctgccgcttcctctaagtcaaagcgcaagcgggaaaatgaagacgagggcgagcgcaaggctaggaaactggccaaggctgcgcggaaggtggagaaggcgcagaggaaggaggcgaggcgtgtgaagagggctgcgaaggcggagcggaaggagaagaagattgctgggaagctcgcgaagaaggctttgaaggagaagaagcggactgcttctgaggaggattacccaacgcctaggtctattgaccaggaatctgatctgactggggcggagactacggggacggatgaagctgttgcgcggttagaggagaaggcgacgaaaaaggaaaagaaggagggcaagaagaataagagcataggagataatgggggcgctgaagactcgaaaaagaagtctaaaaaggagaagaaggataagaaggaagctaaggcttgatgtgtccatttcgttgtacgcattttgatattgagcgcttcacatgcatgtcaggaccaggtacaaaattctgcatatacctgtttttctcttacgcctagaaatcaagataccctttttgtttggcgaaatcttgactattgcaaccataggaaatgtagaggtcttttgatttgtgttggagctaagctacgctggtaattttccaggagtacctgatagaatccacggtcgtttctcccagaactcatctttgatgatgtcgacatggtcaaccacgacctgtgctttccggcgcagtttgcggatcttgtcttgctgtgaccttgactgcttagattcgaccaccagtgattcttcgcccgcaggtgattttgtaggctttggttcctctagctcgtactgtagagaaatattagaacggccgaaacagaaagaaacacatataaactaggacatacctggcgataaagaacagtgccctttttatagatctctagctcgttattgtagttaattccaaaccgcttgaagagaatctcgttcttgtcggcggatacagtaccctggtatcaagtcaattgcctgtaattcgaactgaaagaacaatagcatacctttagctcttgctcggcgtctgtattgctcattccgccttgcaacaccattgtccagaaggtagtgttgtagaggttattgatgtgacctagtgatattgagttagccggatgtagtccgaaaagggaattgggagccacttacaatcaacctgtctccagctcatataatcgcggagaatttggttattcgggtagatgaccgcacgcccatcgaaagagggtagatacggtggcaggagaggtctttcggggaagaactcgctccatttgtaaatgtagtgtgctgtgaatgtagagacgatggtggtaactagtttcctggatggaagaggttctatcaatggccgttcttataccactgagatataagcaaagaagaaatactcacccattacgccgctcaaaaagttggcagttgggatgaaagacaaaactgaaggaagactgttagttaatgcaaggatagcgatgaaacgagctggacatacctgaattcgtcactgactccataggcgatacataggtctggaagctctttcatgacctcaactgccgcagcattcatcagatccagtgcccggcggtcattgggtttcgcgaaagcgtagtgatcagagagtctatataggttagactccgaacagaaacgagagcatgaactagaacagcagtcatagcatcatatcttggtgagatatacgcatagaagacggatatatagttgccattttcttcttctatgaagattcctcatgcaaagggcattcccaaataacaagacatggagactcacttgtgaaatcctcgtccatcaatgcggaccacaatccacgtactggggagcagcacgtccggctgctcaaaggacttgacgtactcaaatctgtgttcatttagtagccggactgaaattttctagaatttccagtgcttacctagaatttgccattttaatctactggactttgatgttaagtgatgaatgtccagagattgaaagtgtcattttgtgcgatttctgcccgcccgcatttgccccaactcgaaggttttagaatttgaggacttgaagtgatttgattaggataatgcaataatttcttgtgaagaccagatatactacaatttctagatacatccagatgactatgtaaaatcaaaaatccgcaaataaaactaatatgttgttgagatgcatatcaaaaaccttcagggaggatgcttaagaatctaggaaatgaaagtgaaaggacaaaccaagatggtctatagataatgtgagatacatgtgagaatcatgaattctcaatctcaggaatctcttcatcgccagcttcactggctcgctcgctagtctcgctggccttgtcagacttgcgagacttacgagaaaagaatcccaagctgctgcgggttgagcgatcggcggaggtcacacttgagacagtgctatcgacactcttgccgagctgcgcttcgctggtggcatcctcgtcaatatcaccttgcgaggattcacctttcttagagaaaagtcccgagcgatccttccaggagctgaacttgctggaactacccttgcgcgtgatcttgcgaatgaacgactccttggaggcattgtccaaggaagtagcagatggcatgcgctccaacgattcataggaatcgccagtgaaaagggatacggagcgagatgtgcgagactccgaaggagatccatcgaaatcgtgaagaccaaagggactttcgggatcattgcccttgtctgtgtctatttccgacttctcgcccgtgagaacggccgtgaatgccggagcagcaggattcagctttggggtcagcggtcgatgagaagacgacggacgagtgccaatcggtgcctggagcggtcgatgatgacggtcaaatgtgtcccccacgaaatcaggctcgccggttagaccgagaggaaggtgtccggacgatccatactggattgaaggtcggcgagaaggagctcgagaccaattggatggcgcggcccagtcaaacccgagcgggctgttgcggtgcccagcattatcagtcgatggccacccgaaatggcggttgtccgtcgaggggtgtggaagttgatttggtgtatcgaatgaggtcgacgaaggtcgcggggacagagaaccgcgccgaacgccaccaagaagcgatgatggatcaataggatcatgtcgcggactgaattgattgtatccactgctaagatcgggatccccacgggtgccagcaccgccgaagccaaacttgctggatgagaatatatttgagaaagcagctcgccgagagggcgcatggtcagaagagctgtccatagtgacaccagtcgtgttgcttcgagggaacaatgacattgggtttgcccagttaccggtatagctcgatcgccgccggcgtgcaccgattggatccagctcgtcaatattccgagggaaggattgactctgaccgggtttcaaagatcccagcataggagactcatctgccagggttttcccacgaggccggtgaaacccgaaaagaccagaaagctttcgcgatgcgcttttcggggcttccccagcagtagacaaatgagcaccttgggattcatcccgccgattttgagtctctagtgggctggcaaagatactgccggctcgactgtccgaagagacaggcgatgctgggccgtgaccgaagctatctaaagtagtactggtcgcctccatggttgcaaatctgggacgaattatagaccgtgggaattctggcgattcctcgtcaccaaggagatcggatggcaacagggcatccgcacggggactcatttgcgggttattgaaagcaagttccgtatccgagcgcatgatctcagggggatcagagaggcctgtaagggccataccgttattgatattgaaaaacgcagagctcggagggaatgtaggcgagtgaccggacgggttgtagttgacgctatttgaaaacgaggtttcgactgccgggaagttcagaggggaagacatattgctgttgagtgagctgcgatggcgacggggccgaatggtggcaatattcgacatgtcgagatccaaggtcgggaaggcaaagggccctgagctgccgggtcgttgggcagtgagccactttagacgttcttgggcttcttgatattgttgctgggcttgcgcgtgcagattcacaagtgtggcataacgtgcgtgtaggttgcccagcttgtgctcccactgacgagctcgctcgttgtcgatccgatccagctccttgccatcttcactatcgccttcttgtaatcccattctttcttcttcgagcttcttgacccgtcctcctttatcctggatctcatcgtcaatggtcttcatctccgcctgttcttttgcgatcttggctcggacctcatctgcgcgcaccgccccttcttcttcaattctggccttgtcatcctttgcctgtatagcatcggagttcatgcgtgaaatcttctcctgccatcgcaagatgtcattcttgcgcttcttgcgctccgcctctttctgctgaaggagtctcatgcgttttgacttttcgccctgtacagttcggttgacgctctcgagcttgtagacatgctttttcaaatcgccacttgcttcatccttctccctgacgcgcttccgcagttcactgcgctgtttttcaagatccttcagcagtgcaatatgctcttcttcctcctctgccccctgcttttccacattctcgttctcgtgctgcaatgacttcaagcggtctgccaattgctccaaagtctcatccttggcagttctggctctgcttttgagtgtctcttcgaaattcccgtgtgaaacgtccccagtcgcaggtgaaattttccgtccggccgagggccgtttccccggtaattggcctgcgctatgctcacgagacattatcggggcggatggcgtcggcagacctactgtagacctggggatcgatgcgcggataattggacccccggcgctgccattctgctgggcttcggacagcggaagagattttgttcggacatggaggatcgcactgggcgtgtggaagtttgcggcactaacggaaagaacacaaatatgatagatgttacccggcaatagatttgatatttccacagctgtttctgctcgtttggattcaccgactagagactgttagtgctttgtttagcgacaagaagggattgtatgtcttatacctttcgtgttattcacttgaattatatgcttatgtattgagttatgaaagtcgggctgtttccaagcaagacggatttcacgggctgtgatctcttcgagggtgacctctggcggcggaggaatgtcgagaccgagtttctcaactaagacctcatttgaagtctggcagacttgccaggcacggtagagaagccttgataaattgagtcagctgagcaaagggaatgctggaacaaccaagggacttaccagatcaaagcccacaagatcgagacggcgagaaagagggccatgacgcctcgcactctcacgcgagggaccactgctgggtaagcgtcaaatgcaaagtataggggctcatacatcccaacgtctgtaacccattggacgtgggcagcgggatacaggagaattgcaaggatcgccaatgctctccggagtgggtgggataggcacgtgacccggaatattagccacccaaaataggttagcgccacagcggagatcagccgctacggcatagaccgcttaaacggagtacggcctctatactttgacggtatgatttacagcagttgcaatttcatgattataatttgtccgatatcttaatattttgagtatattttggatatttgaggtatcttttgagatgtctttttagctgtttgcttaatttatctagaatgccttctagatgccttctcagttccaacccgtggaacggctgtgtgagcttccatatgtaagcatcgtctcatagcaatatcgtggcgtgctattaaggattttgcctagatgatggttttatgttgtcatttgccacttaagaaagaaacctcaagcctatgttgtacactctataaatacgtgtctatagttcgcgtgtatataccaaaccttgaatctactaagacgattatgttatatcaagaggttcttccttctacaactccaacatacgagtataagggaatccaggattctccagatcctagaccgggagctggaggattcatctaacccttatattgtctttattattgatgagcgttccttccttgattgttttgagaatttcgaagaaggactacttagaacatcatgggatacctacgacccttctagcaaccgtcttgttgttaggaagcagaccataacacattcatctgcaagcggttcttttgccagcatatttagttcttggcctaaagacgacaattaccgacttatatcaaagcatcagtgagaggccagtcggagatgaataaacaggaggattactcatggaccctatacaattaggccgcttgaaggaatctccgactatggtagtcgaaatcgcgtgggcagaaacacggacaaagcttgtggaagatatgaacttttggctatcctagtgttatggagaagttaggatcgcactctcaatcacagtgcatgctcgtggaaagatcacgattgagaaatgggagcttcaaggcgcgactcctattcccacccagaaaatggagatcgtatgaaaacccgcaccaaaatgcgagaggatccaaggccacctccacctcgctcttgaagatattaatcttcaaccgaaaggggaaaaagacacagatttcatcctgacaccccgcgatatggaaacacttgcaaccggggtttgggcttttcagtttgatacttgagcttccgcgggacaactggttccgcgttccgaggttgtccgcctgctccaagtgtcacatggttcagttcaacttccccgattctccaacaacttggtctcagtcttcttctttttgtccctctgcatttctagaatttgcttcggattggaaaacttcactcccagctgtcaaaggtgctagacacccatttggcgggatgcagctctatcgctctataagcggttctgtctccaagacatggaattctatcaatccggccactcttagcggggctattgatgtcattgtcatagagcaagaagatggtatttacagttccccgagaggcgaaattcacgataactgatttggcttttctcttcaaggcaccctcgcttgttcgccctttcatgtccggtttggcaagttttcgctattacgtccattcgagaagaaggtggagttcaacgtgaacgggataaaacaagaatatgccatgaaattaggagagggcggcgaggcattctttatctttgaaacgaccgatgacatccccgcatccttgcagacctcgccgttggtatctccagcagccagtccaagagcccagagcgaaccggatcttctaccttcgctgcaggaaccagattaccttgacctagataaagaaagcggggatgcattgtcggaaggcgcaaagaccccgccggcgatggggatgccgttacgggcaaatacggacatgggtaagacacatctccaacacttagtttcgatctaagtccctcgactgaccgtttcaatagggacaataacacccttatcgccatctctcgatgaatccaacgtggcccgttcacggcacggttcgttgagcgataaaccgctgcttgatcatacactctcggaaaacgtgctctcgaccagctctcctcaacaatctctctccggccaatctgcaaatgggaatgatgaacctcgtgatattgatatcgagggcgaaacacagcgccctcgtagtcctcctctgtctgcccaggaagcggtctctcgtgcaatttcgctttcaaagaagctgtctgggtctaatattccatcacatgtcaccgagaccggagatctaatgttggatatgactggctacaaaagcaacgaagaagatgcccttcgcgcggaggttgttgcacgcaagatccttgcagaagagcttgaaggaagctatgatatcggtgcactgattggagccgatgaacatggtaatctatggatatacagcagcgaagagtccaaggaaatggccgatcggagagccactcttcactccatgcgaccaaacatagcgatgagcgatgatgctctctccgacccaggatatcatagcgaaggcgaaaacgctgttttggaaccagcattgactacgcgccatcatcgaaccaaatcagatgttcaacccggctttcccacacccccagattcacctttgcatgagtcttaccccattgaaacccgcaactatgccaaaacacttcgcttgacaagtgatcaacttaaggccttggaactgaagcccggcgccaacacaatgtctttcagcgtcaacagagcaatttgcactgcaaacatgtatctgtggaatggcaataccccgatcgtgatttctgatattgatggaactatcaccaaatcagatgcgttgggacatgttctcaatatgatcggacgcgattggacgcatacgggggttgccaagttgtacaccgacattgccaacaatgggtataatattatgtatcttacaagtcggtctgtaggccagactgatactacacgagcctatcttcacggcatttgccaagatggatacagactaccaagaggtcctgtgatctgcagccccgatcgcacgatggccgctctgcggcgggagatctacttgagaaaacccgaagttttcaagatggcatgtttgcgggatattctcaacctcttctgcggcaaagagaatcccttttatgctggcttcggaaatcgattaacagacgcattgagttatcgttctgtgaacattccgtctactcggattttcacaatcaactctaatgctgaagtgtctctggatttgcttagtctgaataagtacaagagcagttatgtgaccatgcaagagctgctcgaccatttctttccaccaaccagccttcttgtacacgacggtggcgaggaatatacggacttcacatactggagaaacacaccgcatgagattgcagacttctcgtcaacagatagcgaggatgaagacgaggaagatgtcgaagaagaactagccgaagaagaagaggaagaagaggaagaggaggaagaagaagactacgatgaagaattaagcgatggtgaaggcagcgagtaccttgatgaggctgagttggccgagggcgatctcggcgcaagctacatctcgcaggactccgttgccttgtccaaccaagcagcctcaataattgaggcagtggaaggcgatataggtgccgaagagggggctatcggtgaagaggaattgtctcccgtcatcgagaaagcacaagaaacaaccgaaccgagcacaaccgaacttcccatccggtccaagatgccgcaaaatctttgaacatacacccaccactatgtttttgctaaggcatcgatccctgggcatttcttgcgtcatagatacccgtctgcgagtgctttactgagtcagattctgcattagacttccctgacagcgatatatccacgttcaacactatttcatgcagacatggagttggggactacattatacacggccgctcgtgcccgactctttttagttcatggcgtttctccatttgtttttggtacattcatggcgcacatacataggatcatgagaatgggatgtaatgaatggaacaagtgaatagtcttgctcaaacacaatgaagagcctgatatattatccgagggtgatctacaatctaatatagtaaaagcattatgtagatttgaccgtttgttaaagtgatttagttcacttgtgactgcaggcaggcgacgcgattacctaagcgtgatattggctgagccctggagctcatgtttcttttcggcctcatttggccatcacttactctctctccatcacacattaaacgctacttgcatctttggctgtttcctagcctctgagaattgtaccaggaatgctgcccgactacatttcccaggccgtctaatcatcacataattcaacatcttgaccactttcgcaacagtgcaattcgctctttctttcctacttgatctttgatcagcaatccaagataaaatggcatccccaagccaaccacagggccaagcacccaccacacaacctctcacaccacccgccgaatcctccgccacgaacgggacctccgcgcccgccgcaacaagctcccacacccaaccccatgtcccagcaacgggcgcttcaacaacagcaccacaaccgcctgcagtccccgggatatcaacccaggacagcggaaaaacgcgacgaccaagggacgtgcggctggtccacatgctcctcgcctcactcggggtaacctcataccaagaccgggtgcccctccaattgctcgacttcgcctaccgctacactgctaatgtgctacaagactccgtgcacctcgcaacggaaggatacgccgcggcaacagacggtaccgcgggcgcaaagggctccggcgaagtaaatagtgtttctctgcccgcgttgcggctggccattgcctcccgcttgcacttccagttccagacagggttgccgaaggagttcctcatggaggttgcgtcggagaggaatcgtatcgctttgcctggtgtatcgcggggattcgatcctgctgctggtgttaatggcgctgttcctgcggcgaatcagagtgttcttattggtggcatgcgcttgcctcctgagcgcttctgtcttactggaatggggtgggatttgaaggaggagtgggatagtgagggcgaggaagatgaagtgcttgatgtgatgcaccagcctgggactgggaagggctttggtggtgatggagctgaagataatgaagacgaggatgataatgatggcaagatggaggatctcttcggcgaagataccaccatgggcgaggcaggggatggagatgaggaccggaagatgactgatgtttaagggagtgcatttacgtcaggggcttcttctgtctttggtctcgggctggtggtgtttctggcgcttggtgttgttctcatttttctctctaatctgccatcggacagggtcctggttgtactatcacggagagcatctatttcatgacttgtgtctacaaattggggtaaaagtcccctcgcctgaccatagaggcaaataaaccgataaagaagacaactttcggtcaattaaaccaagatatgcaatcgtctgtgtatattgtacataatttccatcccatcgctccgcattcgggatgatcatgcaatgtaataaagatgcccagcaaaacgcctgctttgtttgcctgtgtgcgccgtgaggagagagagaaagatataaggtccgagtccgagttagccaggaaagtccagggccgacatccccggcgggatcagtctgatatctgtccatcaaaccgatgacgggtagcaggccgggaggggctgccggactgtaacatgcaagacccagccaatcaggcagtcaggccaggaagagtccaacagctctttccccctcgcccaaacactcagcccaaagaggaaaatcctcgcatcccgacctcggagaaacgcaagaagcagaatactcaagacgccgaaacccatataaacaagaaatactcacacaagaaatgaagagaacgggggcgggagggatacatggagtaaataggaagagctccaatcatttttccgccgctcgtgtccgcgcctcatcctcgcgcatcatgcgaataacttccgcacgacgcttctcaacccgtgcaagatcatcctcacgcgcgcgtcgccgttcctcataccccgcgaaccactcctcacgtgcgcgatcctcttcttccggcttcgcgtgggcgaccatgcatgaattcattgcgagacgttgctggcggcagacccatgttgcagtgacagtgcggttgacggcgcactcggcaaatgctatatcatagttgggttagttggttgtttcagacatgttcgaggtgtggggagtggatcatggtcatgcgagccggagttgcttctccgcttgaaactcatgaccggcttctgcaagctcaagctatgcactatttggaaagaggtgatgtatttggcgtaggaagcaacgtgaattgtatacctttaatttcgggtgcgcaatgggcgcgtactcgcttgtagtacagcagtttcacttcttgttcttggggggctgagagcggaagcggattgcgaagattatattttttgggtgcacttgttgaagaggtatcgggggatgtggaagacgtagccattgggactgtagatcgatctcaagatcgaaattgacggggctgagtgtatggactggtcgaccggagagtttgctttgagggggattggtcccggttgttgagggacaagatatgagttcggctgctccggagcctaataaaacgaatcgaagaggtagaagtagtttcaagaggggttcatcgaatggctttacagagaagatcgaggctaggtgggagtgttgattgcgagtgagccgagctcgggcggagagaatgttagttactattggcagaatcagaaaaaaaagttctccgactttgcatctcgatacaactcttctgttagagacatctgcgtcttttcgctctttgcgtttttgtttcttctacactttcttgtgctctatttattgtctcgggaattatcaacatcaaaactcagcatgtcgtccatgcgcaacgccgtccaacggcggaaccacaaagagcgtggccagctccagggccgcgagaaatggggtcttctcgagaagcacaaggttagttcctgagaaggaggtcttggaatattttaccaatgattcaagctttctctcatgcgtagttttaagacaaacattctaacttcaataggattactcgctccgtgccaaagattacaatgccaagaaggctaagctgaagcgcctcgaagagaaggtgcgggatcgcaaccccgatgagttcgccttcggtatgatgggagagaagaaccggacccagggtcggcacggacgtggcaaaggcacagcacgagactctgccgcagcgcagggactgagccacgaggcaatcaagctgctcaagacgcaagataagggttatcttcggacggttggcgagcgggtacgccgcgagattgagcgcctggagcgcgacgtgaaattgcaagatggcatgaacaaggtccttggcaaaaaggatgggaaaaaggacgagagcgacgatgacgggtttgacgacgactccgatttcgatttcggggcgccggtgcaatcgaaaccaaccagggtggtgtttgccgatgatagacaagaccaactggcaatgaagaagcagaagatacaaaaagaagaacctgcgctagattcagaggaagaagagcagacgtcaagcaagacccgcaagacacctaagcagcttgaggctgagcggcaagcacttgtggatgctcggcgggctcgcaagctccggaaacgagccatcgaggcccgacacaacaagctgactgcgttgcacaagcagtacgccgagattcggaccgcagagcaagagcttgattggcagcgggctaagatggaaaattccgtgggaggcaccaacagggacggaatcaagtggaagatccgtgagcgcaagcgctaagtgtttttagtgttttcgtttcgacggagtttatgagtgatgactgcttatcatcttttttgtacatattgataccaaccaccatagaggcagtccggcgcatacagtagcatccaaggaacccacttcagtcttggccatcgactcctggaaaagctcgataacatcaagcctgtctcaggcattagctggaaaactcgtgacaagacatcgccgcttatacgggtagatttgaccatcatatcctggctatatctacatctaggtgtggttagttgttgaagtaatatcaacaggttctctttttgtccttctgtccttctgtgttaaattctgaatgaatgtctatacacattccacaaagggtccaattctgtactccctacaaaccatcaaggaacatcatgaccgatatagctatctcttgagcgagtctcatacagcaggcttacaacgtgttccgctgaagcgggcaatatgtgtggtctcattaccgcctagttcaattccatccaatttcaacatcatttgcgcatgtactgtattgctcggcttcttacattcaagctcccgcttcttgatatcagctgtctctgaaaagggccgtttgtgaatcgaggtttggtccagtgatcgggatgcgccttgagaagcgtttctttttctcttaggtctatcttcaaggacagcctcctctgaggaattaggtcgaccgagtgattcatattggtgactcttgactcaaattcaattcacgattccatcttaacattggagtatcgagtgcgtctgaactgccgagtccggattgagatgaattgaagcgatcaacatcaggtttatctgagatgctttgtctcaacgtgagtgttctccgggtggagctctagttgtggcgaactatagaaggatgagacatatgcagctatgtacatgtggagtaaacccgaaaagaccatgtgtatactgcaactgcaaacaaagggatagagggaatgaacgctaaatcaagtccaacatcccttgccatatgtgtaggcgggtgcgattgcctacttaggaagaagagtcggtataggctggtcatgtgatggagccttcacagtgtgccatttctaagattaacgccacgattgctaagcgttgtctctgactggcatcggaatgatataaagtgtactccgagactccgttgtcgcaagagttctaaaaccttcaagtaatcacgccttcgctgataggacaatctctttaactaatcgacaagccctggagggcatccacaaggcttaataatcatttgccacccctccaaagaaggttatcttctccagatctttttcttttctgcacttcatatctcaaaataaaattcacaatggctccttcatttatgaccattgacaccaacgacatggacgtggatttctcctcgcccaagccaatccacgcaaagcgcaccctcctcctggcacccccctccatcgccactcacgaggacaaactccgcggcctcttcaacaccttcgaccgctcaaccacagacctccaaatgctcgaccggctctctacaggcgtcgtctcccttcccgcaacaacatacgacctcgtcctcatcctcaccgacacagacggcgcacggcgctccgaggcgctgcaactcctcactcgaaatgtatacgccaccctcgtccccgccatgaaggccggtgccaagttgcaaacccaagactcagcccttaatgcctcggacgccatggaggccgtcctggccggcctcgtgcagtccgataatggcttcgagaaaccaaagtttgagccctccgccgctgtccctttaaagttcggtctcaggaagaagaataagcctaccccgccaaccgcagtccctattattcccacaggattcggtgcgccgatggggattgacgcgcccgcgactaatcacgaccgcgacgatgacgacgagctcattaatgaagatacgctcctctccgaggaagatttaacaagacccataatgccgcgtatgtcactcccttccaaccatttcatttctacaagacctatatcatctaacaccatcctcttcagccccagagtgccaacccaagaccggtcgccgacgacgcgcctgcaaagattgcacatgtggtctagccgacaagctcgaggcggaggataaagagcgccgtgcaaacgcagataaacaattgaacgtgatgaagctggatacgggcgacctgaccgagctggacttcaccgttgagggcaagactggttcttgtggaagctgtgctctgggcgatgccttccgctgtgacggttgtccttacatgggtcttcctgcctttaagccgggccaggaagtccagatcctgaatgatattgcgcagttttgagatatactccctatttcacgactgtggggttcccttttttttttttgaagtgggggtcttcggtctttgcatttctttgagcattcttttcgggatttgttttttttttttgggttggttttatacaaaattatgctaggggcgtctggctttcattaatttgaatgattttttttactagtactatgagtactatctaatcatgactcacctgaagatttcgaccgagtggatccccaacgtcatgtcttagatctgatagtgggatagatcggcctagtatacagatgtgccgttagtctgccgataattaatttactttactttatttacttgatatattctaatgattggctgtaataatcaattctaaacccaatggcgactaatttgcattttaatgtatctgtgttcatgccacgtccaatcatgatagaaccgaaaagagaacgtaacccaaaaaatatgtcttatctgacctatgactgattcttcttcatgtgggcaacacggatgctgacggcacgcttgtgtgcctccaggccctcgacagcggcgagagtctctaccgtcttggcgagaccgagcaggccgtcggcagtgaggttcgagctagtgatgtgcttcaggaaggagccgaggttgacaccagagtactgcttggcgtagccgtaagtagctggagagggatatgttagcaagattcaattaggatataagggaaaaagtcgttgctgagaaatacttacggagcgagtggttgactccggcggagtaatcgccaacactctcgggggtccagtggccgataaagacactgccggcgttctggacatccttgacaatagactcggcgttctcgacctgcaggatcaggtgctcgggcgcgtagtcgttgctgagggtcatagcctcctcgatgtcacgcacgacgaaggtgacggagtgcgcgagcgagccgcgaacgatatccatgcggggcaaggccttggcctgggcatcgacctcgtcttcgatggcacgcagctcggcctcgtttaggccggccgcgatgaggattacttgtgagtcgatgccgtgttcggcttggctgagaaggtccgatgcaacaaaggccgggacggcggtcttgtcggcgatcacgaggacttcactgggaccggcgggcatgtcgatgctgacgcctgcggaggtgtcgttggaaacgaacatctttgcggccgtcacgaactggttacccggaccaagaatcttgtcgaccttagtgatgctctcggtaccgtaggccatggcggccacggcctgggcaccaccggccaagacgatgctttcagcgccaaccttgtgggcgacgtagacaatctcgggagagatgctgccgtcggatcggggaggcgaggccaggacaatcttgctgcagcctgctacttgggcgggaacacccagcatcatggcagtggagggcagcacagcggtaccgccggggatgtacaaaccaacacgctcgatggggcgcgagaagcgagagcagacgacaccgggcatggtctccatctggagggtttcgttgcttcccatctgcgcggagtggaagcgttcgatgttgccaatgctgatatcaattgcctcctgaacatcaggggacagcttcatgagttcagcggggaacggcgcatgaataacgggggaggtaagtgatgtagcgtgctcgaacttgtgggtgtatttgagcactgcggcgtcgccgccatcacggacatcgtggatgattggcttcaccaggttgacaatggcttcgttagatttctgagaaggacgcttgaggtaatcggtgaccacctgaggagtagtagaagcagtgatgacacgcttcatctcaattcgggttgtgcgatcctcgaccggggcaggggcaggggcaggggcaggggcaggggcagactcgggcttggccaggccagccttttcagcccaaggtcccttggcgtcgccctttctccgcttcaccttcaagctcttgaggtcaaggttgcgctcgatatcctccaggctaacaccggcagcagtgcacttggttagggcgaagtagaacaggtcagccgcctcgaaagcaatctcatccttggtctccgcacggcacaattcatcagcttcctccatgatcttagcatcgatgagcttaggttcattgaataaacgcgcggtgtatgatccagccggagcatccgccttgcgggcatccaaagtcttttggagacgagacagaccggaagatgcgccgaagcaggtctctgtaccaaggtggcagaatcctaatgagtcaccacgattagtatacgaacatcatccattagtgtaggtagctggttcttaccacgtccaatttgcttgacgacaaagaccaagcagtcggcatcacaatcgaagccaatgcggatcaactcttgcacatccccgctggactggcccttataccacagaccacgcttccggctctggtaaacaccggtgccagtacgcaaggcctcaacaatgctctcatcactgctccaaacaaagcctagacaagctccccgctcatcagtgacagaagtggcatacaagccattggcctggtcagtaacagcggccgacgcgataagcttagcggcagaaacctggccagccacatcccgctcaacggtcaatgcctgtgaggggacaatagcaatcgcgccctgctttgtgacgtttgtaatggcatcctccgacactgtctgagaaccgaaaattgtgaagagccgtggggagtccgagctaatcttcaatttctcggcggcggcgaggacggtggaaggtgtagtgcagacgctagcttcgctgcgctcggcattgacggcgattgattgctggaaagtatccaattgggagtctgacagggcgttgacaagcagacgggaagagggcacggattgttcttcggagagggtggtcagttgatccaagttgatcaagatcttagcggcaccggcgttgaggatatcgacgagatcgccggtggaggagatctcagttgcatcgacgaagatatcgagggcgcggaagttctggcgcaaaaattgctctgcctcggcgagagtcgcgactttgatcagtacgcggccgaagtaggcgatctgcttgagcgagagtccggagccggaggtgggggaggaggggtcgtgggagataaggaacggggtcgccatgatgaggtagatgtagtagttaaggatcaaaagattgaaggggagaattatatcccctaaataataggaccctttgaattaataggggagggggggattgtggaggagagcgatgactcccatccaaggttgtgctaccttttttttttcccggcccgcacccgctgaatcatcgtttgattacatccaactcgacttatcgtgggattttattggtgatcttattttgtgatctataacattttgatctaccgtgttcattgcattttgcattttcacattctataacagatttccattcatgaggtccctggaccatgcctgccttaactatgagccatctcatagacaacgtgatacacagaggtttcactattccggtgatcttgaaacccttgagatatggaatctctcctaaggaaaacttcagccttgggcttttgggtgatcaaaaagcggcctcccgagaacaatgtcagccatgctgtaatagcgcctgtctcctcccgcgatattactgtattcgcccacgggtgtttctcccagtcctgtgttgaaagttggacatatgccatggcgatattgctttttgaggacacgactcaccacctcagatcagtcctgccacagtggtcacctttgtgtctcctaacccggtgacttctacaacaaaattgcacccgagtatggctccattgccaagcatttacatcaacgcattggactacagagcatgagccacatgggtcgaaagacacggaggatcggattatatccgttgggttttgtgccacatgcgacatctttggcttacaatatcagatgcaagatcccgaagcatcaaaagagaacaggtaagacgaggtgaatcacggatacgtgcagctccatttgggagtatctccgctagtcaagttgacacctcgaatattccacaccgaagatgggcaggcttaagcgtaagccattcaacccccaggaagtacaattcagtctgcattcttaccaaccctcaccggtcataacagctcccaatctggcaattgccattgaggtgccgtgcagtttaactttacattatccctgcccctgcacgagtaccttgccaatagctgcaactgtgagatctgcaagaaaaacggctacttgctcgtgtacacctgcatcaagggttatcattaaaggcgatgatatgctaaaagatcatcacttttccgagcgcaagatgaagcagtgcggaggtagttgcttcatctgttttccgagaacagggattccaccaattacccccgttaatataagttgaacggccaatgttatgttgccaagtatactagctacggctactgcaggactttgacatcgagaaacctgattctcaaccagagtgcaaagtcttttatattagttattttactgatgctacccaggtatgatgctatggatgattgtaaattgatgacttaacttagcaccgcctagcgtagaaatgacagcagagggcatatgttacaactaagcgatatatatcacgctttggaaatttatccggtgctaagaaggatagatgccagggtatggtgttcaatagccggtacatgttgtattctcgaccgatatctccgaactacatgagacaagtggttggagttcgaatgcacaatccatcggcacggacctgtatgatcgacataaatgttccttggttggatctaagtccatcaggatctccctcaaaacgtggagaaggtgacatagacatatattgacggggtcagacactctagtccggtgacaaagcccatcacgctgaggggtatgttgcatgtcaaagcggcgtgacaggacgtgctcttccttagccaagaccgtgctagtcaggtacatcctagatgccatggatatgaacctccgaagacagcgtcatgttttctcgtcacgccaagcggtcgtctggcttggtcacccgtatagttctctagaatctgagtcaaggtcgatctagaacattgaatactcgagtatatctacaaagcaacaactcagttatgtgaaaactgagaccaaagatacttcggcctcttacattctccgatgccaatagtgggtggcgtccttgcagatcccccatgcccctggatcttcaaagtccgattggacccttttatttggcaggaatggcatctaatgcacaattcccgactatttcccgattttatggagatctgcaagtgacatgaggaatagtaaacaaattgggggtcgcgtgtgggtgtctgcccgcgtgctgccttcctctttcgcctggcctctgtcttgtcaactgcaacctcactatatcctcattccgcactcccatcatatttaagaattgcattgacctgctgtgtcgcagttcaggtggtctctcgtttgcaattcaaattattcttacatgtgcccccctgcaccgaatcttgcctaaataaacccgtatatctatacccaaccacatccacttcgtaatcatgcgcatctcctctctatcactacctttgatgctgggcctggctgggtcttctgccgcctatcctcaccctgagccagaggtgatcttgccccgccagtcggacagccagaccaaggccgatgctgtcaaggaagccttccaacatgcatggaatggatatgtcaaatatgctttccctcatgacgagttgcaccccgtgagcaatggttatggtgactccaggtgaacatgtccgattatccagttcttgctgtgaaactgacacgcgataggaatggatggggagcctccgctgtcgatgcgctttcaaccgccattgtcatgggtaaccaggatgctgttcagaagatcctggaccacatcgagactattgacttctcgaagacctcggaccaggtcagcctgtttgagactactatccgatatcttgctggcatgttgtccggctatgatttgctcaagggtcctgcatccaatcttgcccctaagtcagctcaagtcgatgccctgcttacccagtccaagaaactcgcggatgtcttgaagtttgcctttgatacaccatccggtgttccctacaataaccttaacatcagttccaagggaaatgatggctcgaccaccaatggtcttgcagtaactggaactctggtgctggagtggacccggttgtctgatttaactggcgatgatgagtatgccaagataagccagaaggcccagtcgtaccttttgaaccctcagccatcaagcggagagccattccctggcctggtgggaagcaacatcaacatctccaacggccatttcaccgacggtgctgtcacttggaacggcggcgacgactcgttctacgagtacctgatcaagatgttcgtgtacgaccccaagcggttcgagtcatacaaggaccgctgggtcctcgcagccgagtccacaatcaaaaacctccagtcgcaccccgcccctcgcccggaagtgacttggttggcctcatataataacggccagtatgatcttagctcgcagcacctgacctgcttcgatggcggcagttttatcctgggcggcaccgtgctggatcggcaagactttatcgatttcggcttgcagctcgtaaatggctgtgaggctacttacaaccagaccctgaccggcattggaccagactcgtggggctgggacccgacgaaagtgccatctgaccaaaaggatttctacgagaaggccgggttctacatcaacagcggctcgtatgacttgcgccctgaagtgatcgagagtttctactacgcgtaccgcgtcacagggaaagaaatcgtgggtcattctcccttccactgatgttctaatatactgactcatatagtaccgcgactgggtgtggaacagtttcaaggcgattaatgctacctgccgaactgactcgggctttgctgctgtgagcaacgtgaatacagctggcggtggctcaaagtacgataatgaggagagcttcctctttgctgaagtcctgaaatatgcataccttgtacatgccgagggtaagttgctagtcttcccagtcacccttctttttttcaaacattgctaatcctgggttctggtatagatgccccatggcaagttcagaagggccagaagaattcctttgtgtacaataccgaggctcatcccatgagagtgtcccacacctagttcatacgagagttgggctatcactacagtatatagtgcatgcatcaagcctttattatcctttgtcattggatttagtactgcaaagaaagacaatttgtagccttctaaaccatagtaatactgaaaactaaagccttcaattcagacggttctccaatctggcagagtacagtaaaaacacaagtgccccgtgctacacttcagctccattggacattttataaacgtcaaataaaaaatggcgcccgatattgatacttgagtctgataagtaatctatactttatatcgagatgagcaattaatagttggacgcacaccatttggttgaacttaccgacttgcctgccaaaagaggggaaagacaacattggtcattgcatattgattctgggcctgtttaggatatatgtttcttatgaattggccagtcaacgaagagttctagctcggctacacgatatgattgcgccattttcagaaccggtgacacaatagctcgctagagaatgaatttctataaaacaggccataacacacctaggcaagacacaatgatgctatccgcaaagaatatcgcgaacacgctaaattactagtagacgccagagaagaatctccattaccgtgtataagatggcgatgcaattctcttcgaatacagtaaatagtagaaagcaattgatcgcaacaaacctacatatcacctacagccatggctctcctaaaacaaactctcctagcagcactagcgacaacctcactacaccaaagcaacgaccactaccgctcacgacccgacctcgcaccaccgcagttaaacatcaccatccccgccgcaaacccgaatggctccgaatatgttttcatcgccccgtactccgtggacgggacactagaacggcccggcccgtacatctaccgcaaagacggcgacttggtgtgggccggcacaggctactacgccggattcgtggcgaatttccatcctacaacgtaccaggggaaacctgttctccaggccttccagggtagtattgatggtgcgcatggtgaagggtttgggcagcatgtcctgctcgatcagagttatcagcacgttgccacctcgactgccgcgaatcatcgtgtttcgtcgattcatgagttcaatgttatccgcggagagacggctttgattgaggtcttctatacgactccggtgaatttgtcggcttatggtgggaattcttcgcaggtgtggttggggaatgggattttccaagaaaatgatattgccactgggaagttggtctttgagtggaatgctttggaacacgttgatccttctggtaagataatttgcctgactttataaagatcatatctaaccgtcgactagaaagtctagtgccactgggctccaaatatgctaataacggactgtcgtccgccgaagcatgggattacttccacattaacagcctcgacaaaaacgaagaaggcgactacctgctctcgtcccgacacacgagcacgatctacaagatcaacggcacagacggctcaatcatctggcggctcggcggcaaatatcccagcttctcacaaatcggcaactggaccttcggattccaacaccacgcccgctggcaaccgcaaccaagccagctggggacggaggtaatctcgttctttgataactccggcgacggcactatcacattcaacgatgtatcccgggcattggttatccagataaaccacacagacagcacggcgacggttctccgcaaagcaacagcaccttatgatctccaggcccaatcccagggcaatacgcagctgctttctgacgaccgaatcttcgtcaactggggttcggagggtgctttcacggaattcggtgctgataatgagattctttaccatgcccttatcgaaacgggggcggtcagctaccgtggtttcctggggaactggactgcgacgccgaaggaaagtccggcgctggttgcgctgaaaacggcttcgaatcttgtggagctttatgtttcttggaatggggataccgagactgcggcttggagattcttttatgtcaacgggcaggagaagacgcgggttggtcaagtggataggaactccttcgagacggcttttacttggaagtcgacttttgcattgtcttcctctgctagatttgttgctgaggctgttgacacgaatggggaaactcttgggcagacgagtttgactgctaccactgccaatatcaagttgctggcgtgatagccaagattgggggacctcagatcttcaactccggtcgcagagctctcttcaactgtgctctccttctaccatttgtcattctgccatattcttctagacttactatatatacacccccaaattactagctacacacccttttgaactactttgggtcaggccttttggctggccatgtaatttaccgagttttatcaagtaatctacacaaccactaaatactagcactcccaactacccattattcgtatttgtaggattattactatcatctgttatgcaaatagctttataaaactagtcggaggcggtatcgtatcatctgaagaatgtgtagctagtaatttgggagttatagaggtccctgggaatagttgacaaactaagctccgatttgaaacaagttatcacttctccgacatgaatacgactatatttcccatcgattttgatcagagcaaggtcccaacctatgacttgatgcagcggaaggagacgatcatatgactttatgcggcggaaggaacacgatcacatgattttatgcagcggaaggacacaattcccatgagttataagtctggactaattaaacatctgcaaagtattttaggcggacctggtccatcgcgagctcttccggcattggctgtaggaatttatcaatctcatggacccaaaaagtgttgtgtggattgacttggtaggcagtagtgtatttccaatatgacggataccaaccagcagtttcccaatcaatgataccaacgagatcatctccacgaacaagaatgttgaggctgctaaggtcgccgtgcgtaaataccaaaggccaagtcttgctgtgctgtttgataagttcctggatgtcagggggaagccttggatcaaattccatgcccatgcgtatatgccgatggaagtcttggatgtttttaaatggaccgaagcgcaaggaagtgcccgcaacacgacagtcaaaaagtgacccgccatcaacattagcaatcatattgccttctgggggttgaagtttccgcatctcgaggattttctcagctaattgcgaaagaagtttcgcctttgaatcctcacttcgataaacccagcgtttgccaattatgtctccctgaatcctttccatcacgatataggtccgcccggatcgagtgaatgcacagaaaacctttggtaccgggatagatgtatgctgcgatatgaaccgcattgttgatgcctcagataaataaacgcgacacccgtgcttaacgcaaattccgcccgtcaacatgagaacattcccttgtcgaggtcgaatacgctcaaggagtttgatcgctataagtgtcgaataccgacgcaaaaaggtgttcttgactggttgggatgcaccaaatgaagcagaggatggcgaggaggaaggtcctttttgactggacgacattatgattgtgcttgaaatgttcaagggaatatctcaggaatatctcgtttctagactgtgaagggaacttagcatggggtcttccataggaagtgatggtcagtgatgcccaggggttatccctgatggtatgatcccaggttcgaaggtgtttagggcccttcacgtgatatcacatgagccgggtctattctcgggccagctgaagttattgtacgaattcttctatcttccacttgactttctattgtctctcccgcctcaatttggttggggtctgctgggtctgcgctgcagtgtattttggggtggaagcgggttcgacgatcgcctagagtgcccacttatatagctggccacttctacaaacatgtaaacatcaaactctcgcttagatagcaagcgaactacgaataaagaaaatttctataaattagataagaacgaccacacttccattctgtccaaataggaaacaaagagtctgtctacattaaggactttacatgcacaaacatccatgcaaacattctgaattcaaagcttggcatcatgtttccagcccggcatatcagcgagatctttcgccggggcactacgtatagatttgagagcatcacccccaggtctccacccccacggatcagctaggtctggcgaaagagacccttctatcagctcaacgacatgtttgccgatgttgggtagaagcttgaagctatgactgtagtatgcgctgttagcaagccgctgatggtataaaagcccgcatttgattatcaactcacccactatctcccgtggccagaatgaagtttttccacttggggtgttcgcagatgagtaaattggcgtcggcagtatctgtgcaccagcacatagagcggttgaaaagctctttatgcttgaattgaggcaagaatctcgcaattgccttgcgaatggtgacctcggaagcttctgggtaagtatctgtaggatgtttggcgtgtgatcttgggacagatatgtttttaggagaggtcgctccgtaaggttgatgctgcttgaagcgagagaatcccgggaactcgtcgcagactttgataacgccgtacctatagggacttagcatgcggttctgctctttccaacattagatcaagagggattgcttactcgttgggctcgaagaagaagccgtattcgccatcgtataccacgggtgtgtttttgtacttggctacttcctcgggtgtgagctgaatatgagcaaagacccacgcctgcaagaatataattagtaactgattcatttgaaccgggatagagagaagaagtatatcgtgaacttactttcgaaacacactggtcctccaaatctaccaatgttggactccaagcaccagcagccaagaccaccttgtcggcgtaatatctagtgccatctactgtctcaacaccattgcatgtgatcccatcggcggtaaacagcggttgcttgaaagttccagatctatgcaatttcgcgtcagtaaaataaatacaagctaaaaaagggtcattacatacttgccaaatccaaagttgacaccttgatcctttagaaaaagtccgattgcattgatagccttggctgcagcaagccaacctccatcgccacaaaacaagcctttccacccctgaatttagactttattagccgctggcccttcaaggttgtgtacgggtgaaatttacctttacctgctctcttgtaaagactggcatcttttcaagtatatcatcttcgctttctaacaaccagttcgttttctctaacccaatgttcgcgtcgagcattgattggtagctttttcgaagatctgcaataccgtctttggatgacgagcagtcaatctgaatgtgttagtatggaatgttgaatctccaatggctatttttctaactcaccctgccgacattgtgaaagaagggcttgaatagtggatcattattccacatgtcaagagcctcgagcgaaagttgcagatctggcccattgcgcaatcggatgcccatgatcttgttaagatcgtatcctgccgattgagccgaaggaatgggatatacatcaagcactgtgatattcgagggagtatacccagagcggatgaggtgcaacgctgttgaggaacccatggtgccgcctcccccaaccaccacgactttcgtggttgtacgcgaatacgccatttttcgggtcatttcggtgcgaaaaccagaatgagggaaaacaggatgtgaatttaagaagttgaatggcaccaattgctaagaaacttgctaaagcgattagataatccccatctatataacatcgcgtggaccttccatcgattaccccgatggccagaatccggccttggcaatgcggggaattaccaaattggcgataacgagatagccttttgcggttatcggccccggctttcgttccgttatcatttgatatcggctcactggaagtccatacaaagattacgccgccatgaatgcgcgtactttcgcgtggaccttcacccggcttgatatgacccgaatggaacttgattgaccccgaagctagaggggaacatccatgtctctgcgggtagaagagataagctcacatataaaaagcaactaggtcctgcaatcaatgtcgggggaataaatcaacacgcatggaaagcgaaattctgttgacatcaaagaccccgaaagccctgtcatggcacaacctatcataatggccgacacaaagactcctgtctcggattcgcacgatgctccttctatcgcagataatgccatcggccatggtgctgtgattgacatgcagcactacaaggacaccgttccgctgtggaagcgagtatggcagcatagtctgacacagatgatgctgttgagcatccaagcattctgtggaccagcaatggctgatgcaattaccggtaagactgattcaccattatacgctaggctacagaatggcctggacctttcgctaatgttttgcaggcctcggtggcggtggtcttgcctctactcgggtgtcaaatatctcgacctcaattggatatgccacgctggcagtcggtatgtttcattacccaacatgagtatttagatactaatttgaatagtctgctgcatcggaggtcctcttgtgaacaaaatcggcatcaagtgggctcttattctcggctcaatgtccttcccaatccaaggctcggcatactactgcaacagcaaatttggaaacgaatgggtgagcgatggcaatgacaatggaaacgacaagaaatgtgactgcatgatctaacaagtccctcctagtacctcatcctgagcggtgctatcagcggtatcgggactgcttgctggtatgtcgctgaagctggagccatcatgacgcttgccccctccggcgcccgtgggaagtatctggctctgtggatcgtttcgcgaaatcttggacaattggtcggcggtgcaatcaagtgagtaatgcctcagtcaaagactcgaatgggaaatttggactaatactttcgctctatgtagcctatctaagaacttcgaaaaaggcgtcagtggcggagtcacttccgatacgtttattgcctttgtgatcattgagtgtcttgcgtgggttcttataagagagaattgcctgcaaccttatgcttatgatgtttaataggctaccattcgcgctattgatcacacccttcgaacgcgttgtccggtctgacggtacaaagattgtcacttcggaaactctttccaccaagatggaattcaagtatattgcaaagaccctgagctcgaaacttattattctttctgcgccctgggcactttggtcatttttctacgggtaagcccgacagtcactgccatcaccatcaaaagcgataatgctaatattcgaaagtggtacttggtctacatatctaggaacttatttcaccgtccgtgctcgcgctctctcgtcgctcatctcgcctttcttttgcatgtaagtcatgcgaaatcatatcatcaacacaaactaaccttggtgcgtatcagcattggctgtttcggcctcggattcattctcgacatgaagggtttcagccagcgccgtcgtgcccagatcggcctctacactgtcatcatcctcaatgtcggcgtctatatctggtccattattatgcaggtcaagttcaaccacaacaagcccggcgccatcgattgggacgatggactgtacgcttcgtcgttcctaccatatttcttcgtgcagacgaccggtccgctgtcccagtcgtatatgtattggcttttgtcttccttcgccaccgactcgcagggtaagtgactccatagactcggacccgagtccatcacggcattggacgctaatggcaatttcagaaaatgtccgcaatggtgccgcattcagatgcattgaagctgttggccaagctattgcctatggcatgaacacccagattaaaactaatcctctgattggattgtaagttcaatcatctgaattcgtcccttttgacaaaaagccaactgacctgattcaagctgcgtgacgttcgccctactcggagcctctgtaatccccatgattctgcttgtcaacacgacaccggaccgtatccctgcagatttagttgccgaggagcagaatgctgctcttgagaagattcgagatgtctaagtctgtttgcatggcggggctgaaagcagcttacgcctttcaattaccaagcttgctagaatgatataaggagtcttatttgcccctacttggattgtctatatttcgtttatttaatctggatctaatggtcaacaattttgcttacttgaaactactcctttccgtactattgtaacgttttgcattcgtttcgtaacgcgcgatcagaccattcaatttgttaagttgagcattaatcaaaaaccccttatcatcaagctgaaaccaaaagaatgttctccgtcaaatcaaactgaaagacaggtgcttctcgtaaacataaaagtcgaaaggacataagaaatgaatagccaaaagaatgagggtaaacaagataaaacacactcgcatccatctcacaacgaaccaatccatagaaatgttcgttcgggcaaagcttcgccaagccctaaattccccagacaaccacgcgcattggcttcaacggtactcaacgcgctcgtagatgtactcaactacttggcgggagtactcgacatcctggtagtagacctcatcaccccggtagaagacctcatcaccctcatagaactcatcatactcctcgtggaagaactcctggtcttcgtagtagtcatcatcctcttcgtaggccactgaacgtatgactcctagcatgcgtcccggtcctagtctatcgagatgtctctcgatgactctgtccctttgaatcactcttctctcgcctctgttgaaccagtaatcgagtagtatgagaagtagcagataccagacttcgtcaactgaaggcttgaagctggagatgggaccgatgaattcagaaccgccgttccaggtcaggtgttctcggaagttgaagttgcgggaccggactggttcgctttcacggcgtctggggaaacgcacgaagtcttcgaagatgaataggatatggcagaggtttgaggcataatagtcgcatatctcgaagtgcgcgtgccagaatgaggtaccacgggggtagacctttttgcagatagtgacaatgcacatgttaatgttgaggattggggctgtagaagttgagcttggaagaaggtaggtttgaatagagtgggaatatcgaagctgggaaagaagggctttagtcttgatagctgcttgagaaatgggaggatttggccggatatttaaagcacttcatcacccccgtataatatcagctttatgcttttctacaatcaggcaacatacatcaagcttagatatgattataagcagtattttccgagacatttatggccaatagatattatgactcgacattttgaggcggccagtagataggcagtgtatacttccttgctctttataacatcaagttatattccatagagggagtccacgtataggttcgcttgattttgggatggcagcctatcaaaatctcatagtatagtatgatacttgctgcattgtggctttggctccatcccaagagcttcaatattcaacctgattatagtaatgtgtattgctattattccctttctctttctactattttcaacgggattgctagggtaagagcctctttgtcgctacctaccatgtttgcatttttgcattctatatgcctcgtttgcatcatttgcatctgtgaagactattcactataaggtattctctgagagggggagaataacgcgggcatcgtcaatcacctatcaagagcacacaatgtttacttacactctcgcatccttgcatccttgcactcttgcactgctggatcaaaaagaaattctttccatctgtttcaaaggtggtactcttgatgttcacagtaccacgtcactctcatcatgataatgagtctacctactagtcaacacgaggctgaccaagccgaggccaggcaaggtgaggcagatcagaaagtgacaacgtggacatgacagctgaccaaccagctctagagcaatccctgatcttatctcaaggacccggtatcaatattagcatccaggcctttgacctgcgccactgctctcttgacgggcccagcgactccccaggaggccaccaatcaccctcggcatctctgggtagaggcaccggccatgccagcgatgacacagattctcactcgtccactgaacagtgcagcgagaacgaatcatctgaaaacgcgttagtctcacctcaaacacctctgagacaaatgatcccaacatggatctcgagcctcatttcagtctcaccccgactaaccattgatggaagttcttctcggcctccaaggtcacccagaatgtccgacccctgggatatctacaagtcagatactgctgtcgccaattaccgcgcgatcggggcccaataccaagcatggatagccgatacagccacaaccccatgcccaatccacctatcaacactcaccatggtagacatagtcgaaaacccgcatgaagagtacaggttcgaggtatgccgcaacgagttcagatccccacccgatgaagtggggaacctcgaatcggtcgggctctcgatggcgaatacttggcgcctccttttcctgaggcgacatggatcctgggatgacgatcgccgagagggttggacggcttaccagcaccgcaccgcacacggcgcgatcttcgctgagaacatcaccagacacttcgggccttactggtcccagatcgctctggcgcagtacgcgtacgaccatcacatcgacaccctccgacatgtttatgtagtcaacattcagaacttgtacacctggccgtacgtggaatcctgtctctacccccgtcatggcttgcaatggcacgaggacgatcgataccagtgctgggaatacggtaccagggagtatcaggagctcctgggtaccaagctgggaaggggggtggcgcgtctggttctgagcgcttggccgagaggcactcaccgtatcgaggcaatcatcacgtggacgtatgttgggaccttgcagatgcggtttgatatcgggcgaatttgattcatggccgagggacacccactgtatcgaggtgacctgcacgtggacgtttgctaggaccttgtagattcgatttgatattgagcgaatttgatttgtgacttcgagcttcgtgaaccaaaagagcgctttgatccaatgtagagcgaatcgtatgaagaggagaagcgctagcctctcttggcggtttcggcagaacttagagtaagaggtcgattggccatggcagggaataggctcatcgtagtcaatcagatgccgggggtgttggaaattttgaaaccctatatagtatgtagtatagtaaggcgtgggagacatcagttgacaatggtgcctaatcaatggacaaggcagaatccgtcgatctcaacactattgtgagagatatatagtgcgtctggattttgatgagccggcatcctatcaaccccaagcactatgctccggtgtcatattcacaccaacacgggcctaatagaagttgatattaatatcggcagcaagcagtttgactgcgccacattttacgtctctcactcagcttcaccatagtgctatattacatgtagatatgaagaattacaatgggtactgcgggtataccaatagtcaaaaggtcaaagacatgattcccaaataggaaagagatttcatccagtcctctgccgacaaaaacatgacgatttaataggcacatccgcccaggctaaatcagctttcagtcgcggcagcatggcacgcgcctcgtttttctgacccatcttgatcaaacactcaaaatacccatgcgaagcccatacattcgctggatgcctcaaagcacggggcagagatctgtcaaccccaaggtccgcagcatatacggctacagcctcctcgacgcgatcctgttcgagcaacaacgctccaagtgcgtgtctagccggctgcatccagccccacggctcgtcatacggcaacgaatcatctctcctcacagcttcccggagatatgaaaaggcagtatcgtattcgccccggcgatatgcaatctcgccatccaacatcgcctcaccgacacggaggatgtcgatgcagcggttattgaagatcgtccgtgaagccgggacaagcttcatcgctcccagaaaccgttctcgctcttcctctgcttccacaacacgactggtcgcagcaaacgcgatcccctttgcatagtgcatcatagcagtggtgacgcagtacaggtctgcgccttccggcagttccgcagcaataatatcctcccagcggccgaagcgcacaaacacatgcatttgcacggagataaagccctccagccagtccgccatcggcggcgactggatgcggaggagaggctcggtgattatccgggcgagctcggccgcagactcgagtgcgaccttcgatcgaccgcccagcatagcagcataaatcctgaaatgataatcatgcgcacggtaaagattataaaaatgtcccaggggctggttggcgaggaacttttcgtctgcgcggattgcagaggtattagccgccactgcgtttttgtaaccgccacacaggacgtcaatatgggacgacatgtgctccagatgaccagcgtctggtacaaggccgcgaagagagttggatttcggcagggcaagttcaggaatgggggacatttccatcaaatggatgtagagatgcaggacgccgggatgatcataggagtcggcttgttcaaagactcgattcagcgccttttccgcttccagtgttttcgcacctggcgccacctcgccggtcttcacgtcccacagaccccatggagtcaggttcatcagcgcatcgcagtacagcgcggtcacgtcgaggtcatccgggtaatcattgtacactgatgtcattgcctcggcataattcttatcccattccgtgcagtcttctatgggctgttcttggggataccggtgctgcagtgcatcgataagagcattctccaacggcgtcgcggtgggagcgtgcttcttggcctctaggatcgcgcgatgggcgcgactcgtggtggcggacagatcttctccgtcgaatagctgccatggcttgttatagttcggacccagggcaaaggcaatgccccagtatcccatgacgcacgtccggtcgaattcgacgaccttttcgaagcatcggatggattctgcgtggttgaaggcgtaggcccagatcaagccccgactaaaccatagttgggcatcttcatttgttgtgctcacattgcgacggtagtcgcctaggttatagtagtcctcggcgggagatggctggtccattttgttgatgtggttgcgtatgttgtggcggaggaggggtatggttgccgaacacggctctctcccagactcatatctaaccactttgaccacatgtgacacggggataagcgccatagcaaatgatgtatatactgggttatttacaaatagtcgcagctgagtaaagtgcctgaggcagtatatcctgaggcaacaaggcagtaaggcatcaatccgccccacatgagcagatttgaggaaatccactttaatgtgctcagtcatgctcgatcactctcaccttccaaggttgagcaccttgggggcctactgggaatcctatttagatagcctcctttcatctctctttgtgtttgttacctgcagtcaatatagtcacatacatatcaatcctcttcgatcccatctcattccatctcatttcaccagcttcacttttatagatcaccatgtgtggagacaccaaccgcccaacattcggaggcaccattgccgtcctattcccccgaggcactcaccagagctcgaacacttcagatagatcattgtcctcgtcaccagaatcagtatcctcatttgcatcatcatcgtcgattgcctcgatgtcatcatactctcttttcttccgcgacacggatgcaacaacgcccaagacaagagcaatcttccggacacaagacgcagagacatatcacgcactcaaagaatgtcgaaatgtcgatatgcgcatcgagtgggttgactctgttccacgagtcattcaagacaaaatgctgacagttcatatcaggaaattcggcgatctctctattacatcacaatccatctctccgctccaccagttccgtttgaatatgggacaggacaagaactgcaacacggcgaatccgatggagatcgagttcgagctgcccgaaaggctggacctgggcgtctcggacaagggtgtcatcggccgacaggtgactgtcagagagcaggggggttcgattttggggatcggagtggtgggatacaactaaagtgactggcttctacatacttcatagacataattggaatcaaactaattgaaactcaaaactctacttcattatagacttcaaagcttcagcaggttctccacaccagcattgtatcgcttctctgcctcagcccagtgaataatcttccaaataccctcaacatagccagccttgttgttcaagtactacaagcaagcagtttagcagacaaatacacacaagacgggtagagcaagagaataaacatacctggagatagtaggcatgctcccacatatcgacaccaaagacaggcacatcaggagcattaataggatcctgatccttagtcgtaacaatctcaagttgacccttggcaccacccttactcacaagccatccccatccactcccctgaagaccgagcagctccgcaccaaaagctttaacaaacgcttcatgcgagccccagcgggaggcgatggcttcgctcagagcaggagcaccaccgaggtcattcccaggagtgccggggggagtcaagttcttccagaacagggagtggttaatgtggccgccgccgttgaagcggagtttctgttgcaatgcgatcagggttgggacatcatctgctgaagctgccgaggcttgagcggagagtgctgcgttcaggttgttgacgtatgcctggtggtgcttctgatggtgcaactccattatctgcttggagatgacgggctccaacgcctgtttattgttagtatggaagagattcgggttcatgatcggatggttcttacatcgtaggcgtaggggagagcaggtagagtgtgagacattgtggaattgtggattatgtgtgtgttgagagttgagaagagtgagaatggagagtagaaatgtaggcgatagataaaccaccaaggtccctggggatgcccctctctagaagtgacgtgatagtaagcatatgtcaagacctcgggaggccaccaaggtggatatccaccggtggatgtggacggcaattgggatgagttggattgagcacatttctcccaaagttgctctaacctgctcagtcggccctcgcagagtattcccggaattacataaagcaggtctaatccaccatctggtatctgtattatctcatacaatggtcttcctcgtttacaaagagagacaggggaactagccggggaaactgggtctctatgctcaaagtgggcttgagcaaagatatcatttacactaaacagaaatagagtcaaggttggacagcacgcattgtagaacagtcaacagtgtatacaaaaaagacaaataagaatgaagcaaaaaaaaaagataggccagcaggatatggaaccagaaggaaccttgaacaaagtgtcctcagaaaaatcttcactgaacaacagagagctatctctgtgataggttctaaaaattgggtcggagatgaaacagagctcctaatgaacaatgcaatgcgggcatcagctggacagtctgtttccacagacgtcagtcagaatacgcgactggtagagcattgttacctcctcagacatgtttcgtgccacaacctaacctgatacccacaagacagagctcgagatggtcgatgcaagcagcagctggacagtccgtatccacagacgtcagtcagaatacgcgactggtagagcattgttacctcctcagatatgtttcgtgccacaacctaaactgatacttgcaaagaccatggtaaaaaaaatcaagagcactccaggaacgaggtgtagtgcggacccagagtggtgtggagaagaaagaaaaaaggaaggaagtgggaggaggcagggaggtatttataccttcccagtggcttaaggcaaacgggtagttaggttgttgacgatttttcccaaaagggaaggcaccgaaccgggaaggttcccagccacccagccacctgcgcaccaggtactattcctatttgggtcactccatggtcatgacacctgagacctgatagaacagtcgctccatacacatattaccttaaatttgagaatcttggccgtttcgcgtgcgtgaaagagtctgtagttgttagatcatgcttctattcaaacgaagactcaaccgactactatcttgatttcaatatttattccagaatcatgttcaatatcatttgcatctagctactcagacagcctccataattgcagctattctgcataatcgtcatgtttaccatccagcgctgttatatctttgtgaaagtggcaaaatccctcgtttcttagagtatggctaatatcacaagaggaactatgaatatattcactttctccccaatctcaaggtggtttgtttacatcaaattctatcgaccaacggatctgcaatcctgtttgttctagaatccactaggtccttctagttcccgataatattggtcctccccttcctgccggctttgggaacagctctgggaagttagcccgccgccagttttccagtctcttgaactgcagctgccgtggcgtttcgcctcgtacattgggctgatccatcataatatcaccccctgcccccagcaagacaacacgcatctcatccagcgcttctctctcatcagcggatgtgggtatcatacatccatgcctgtctagaatatgtcctacgtacagacaatggtgcaaggctgtatttcctctggaatctgtattattgacatccacgcctctgcttatcagaaatttggtcgcctggacttgtcgtagattcctggccataagatgcaatacagtatacccatccttgtcctgttggttgatttcgacaccgtgtgatagaagaatatccatcagatggacgtcaatgggatcgccagctttgcaattggctgcaagcttgtgtagcacagtttggccattgttgtccactacgtctgcttccgctccgttctccagcaggaacttcaccactgtatcaaagtggtcgctcccagagcagcatgcgtgccctcttattgcatggtgcaacgcgttttcgccctgatcgtcccgcgcattgatatcactaccagctaggagtagcttcagggtatcgatgattcgatctttgacatgaacgtcagaaagccagcattcatccgaacctgggcccacggctgcccagtgaagaggcagacgcccattactatcgcgacaggatagggattctgtaatatcacttccccagtggtcaagaagcgttcgaagtgccttcgtattccaatacatgctgctgatatggagtgaagtaacactccatggcattctcatatcatgccaagggtgagatgaatggttctgctggaactgctccttagcgtgtatattgggcccttggtcaatgagtcttttcaccaacgcagagctggctctagaggaggctagaccaagcactgtaccaaatgattgtagtggtttgctttcatcactatcatctttgactgcattaccaccacagagtatcctagacgcccattcaacgtcattggcggggagttcaaccgcttgagcagacgcaccgctatcgaggagcaagcttatcaatttctcgccacgggcaattaaaccggtcctccatcgatcgagatcaatgggcgtctcaggtccgcgaccttccggagacaaatacgtcagagtccttgcagctgccagcagcgctttatcacggtccgattgattgaaatcgacggagtctggcgcaggctgcatatctaggataaactgcgtcgtctgaagatgctgcccgctgcatgctgcgctcagcaatgagtgtttccttcgatggagcggtttcttcattaaactagtcttgtagtagtgatccacgaggacacggagaatatcggtgctccctgcctccgctgcgacgcatagcgggtcgtagcagaaatcatcctcattataaagattcagggatccgtaaacagtgagatattgcttcagcctgggaacgtcattgagacggattatgcggtctagaagaccgcagtcccaggtctcgtagagtcgagtgccatctgtgtcgtgaagggcggtctcttccgattctagaatttcgttcctctggatatggaaagtgcagtatcgcatggtccagagatttttgtgaagtgaggcgagtgtcaaatgaacacaaagggagaaaagaaagactggaacctcttagcttagggaaatgtctccactaacgtagttcccgcccgagtgaaacaccccaaaacactggcttggaaagcgaattcgttcagatataaggcaggcttttcagtcagatggtcgcacaaagcctcgagcgtcaccggagtgatactacgcaactctcggaagaactcctaatatagactagtgtgtcttggcgtaaggggcaggaaagtcaatcgaagagtgtatagattactaatcccccagattccaagctccaagcggggtagggagagtcaacgagcctcggtcaattcggctggtgcaaatacaaatagctaggcccggaagtagcccacttttccctcaactcacttttctacatagttgagttcaaatccatacataatgtccgccgaagaacaagtcaagctctccgacttctccagcatcttctccctcgagggcaaggtcgctgtcgtaacaggcggttcccggggactaggcctacatgcagcctcagggtatgtatctctctagtaccctgccaattattcctgacatatcctaacatatctgaagcctcctccaagccggctgctccaaagtctacatcacttcccgcaagaaggcagcctgcgacgaagcagtcgctgctctcaatgccattcccaacaagcggcctggcgcacaagccatctccgtgccggccgacagcgcagatatgaaagagctagaccgacttgtcgccgaggtaggcaagaccacagaccatgttgacattctcttcgccaatgccggcgcaacatggggcgagaagttcgacactcaccccgagaagatgttctcgaaggttatggatttgaatgttaagagcgtgttctacacgatccaaaagtatgttatttgctagccggaactagggatgagaaggattctaacatcggatcaggttcaccccgctcctcacagcaaaggcaaccgtcgcagatccatcccgtgtcattatcaccgcctctgtggcgggtattggcattggcgcgatcggtgagcacgcaacgccgtcttactctgcttccaaggcggctgctatccatctcgcgaagaatctggctgtcgagcttgggccgcgtcatgtcttgactaatgctattgcaccgggattcttcccctcgaagatggctactgggcttattgaggccaagggtgggataaagcatctggaggagttctcgccgaacggtcgtctcggaaagcccgaggatattgctggtttggtggtcttcctcgggtctagggcttcgagtcatttgaatggagcggtcattgcgacagacggtggagctgtgatcaaggggagactgtaaatgtttgatttgtggctgtaaagacggtatagataggtgcccaggtgttctgctttgattagtaaatatttgatatctcactagccaaaaggaaccgatctgttcatgtagactttcgagacctcgggtactacacctttcgcaatgtctgggccgaggcgggtgttctccacactccccgcattaaaaaacacttccgcgcctcgatgtttctcactacatatccaccatggcctcccaggaaccccgttatgtggcagttgctcagcgcaagcaagcagaccttgctgcagctatccctgcagaatggcgcctgccctcacacctcatccctagtgggatgctctcaatctccgagtcgatcaccgttggcccaaagaattacgagcgagtcggggtgatggatattccacgcacatgtggtatacttacacccaaagagttggaaataacagagaaatacgatgtacggagccttgtggcagaaatgacagaaggccggttgaaggccgaggacgtggtgcgagggttttgcaaggtgcgcccacacgccgattatctccgttcgaggcactaatagatctggataatggcagagagcagccgtcgcccagcaactcactcgctgtctaaccgagccgctcttcgaccgcgccttgcaacgagcccgagagctggatgatcacctccagcgcacgggcaccccgataggccccttacatggtcttccggtgtcggtgaaggacacatttaatataaaaggcgtggactcaagcattggattatccgccctagcattcaagcctgcaaaagcgaatgccccgctagtagatctgctgcagtctttaggtgcggtagtgatcgccaagacaaatgtaccacaaacactcggaacattggatagctgcaaccaccttttcggacgcacgctgaaccctctcaaccgtaaatggacagccggcggcagcaccggcggagagggcgcgttgctcgccatgcgcgggtctatggtcggttttggcacggatattggtggtagcatccgcgtgccagctatgtgccagggtatctacgggttcaagccgagtagcggacgcgtgccatttggaggccagcagagcggtcagattgaaggtaagggccggatagggttgcaagcagtggctggcccgttggctcgctctgttgcggatatcaacgccatcatgacggagatcgtcccacgcgcggagctgttcggcgaagattgcattccggggccatggtcggtaccagccataccgcttgctcccgctcctcggcacagctttactattggtgttctcaagactgatggtctggtcacacctctacccccgatcacgcgaattctgaacgaagtcgccaacagcctccgccgtacccccggcgtcgaggtcgtggagattccgcttccgccggtcctagctaaatgccaagccctagcgggtcggctgatgggcattgacgatgggtcgcatatgctcgacctgattgagagcatggacgaagacctcattccctggctgcaaggtcgaatgaagcgcggtaaggccttgaccgtggttcaactggcgacgctgcaggctcagcgctctgagattgagagggaaatgatgaagatgtggactttgtcgtcacaggcttcgtctgtcgtccgacgcgttgacgccataatttgtcccgtggcgccccacccggtgccggagatggaccgctacaatgccgtgggatacacctcgacctttgtgctgctagactatccggctgcctctgttcctgtccgctcgttcacagacgctgatctggagattgggcgcgaaatggaggcaccggtgttggggagttgggataaggccaatcggcagctgtgtaagttccaatatgatatataggtgatatttcgctaacttgcttcggttacaggggacgagaaaacggttgaccgtcgagtgtacctcgggtcgcctctcagtgtgcaggttgtcactcccaagcagcacgattatcagcttttccaggccatggagattgttgaccgggctgtacagagcgggggttcagccagtgcgaagctgtagccattgcaatgtgtcatagaaacacgacaaacttttgacgtgatcacatgggcccatcctatttacaaaagtcttaagttgtattcgtaggaggcaaatatatgaagaaacgccaagaaacaaaaggattcgtcgggggcgtcggctcaatgttcgcaatgcgcattgacctgattcgttgacttggagaagtcaagcaggtcggccaatagaaatcaattccattgggccagaaccacacaacgggcgataagcaatgcggctaacccctgacaagactaaagccaatctcgcgatgctcttaattatggcgccatcgtcgcccatttaccgtctctggcttggccgtccacgataccatgttaacgctcaggccaaaaaaaaagacgcgaaaaaataaatgaaaaacagggttcgaatccacgtgtaattggtctctcatttgtttataacgtagagccgatctcgtgcctattgtagacttgtcttcttcctatcacctatcacctccatttcacccaacatgtccaaggacgacaggaaggaaccaggttacgacctgggcagcactgagaccaatggagaatatttcgataccatcactgctctggtcgctgcaggtacggcttcaattgtgctgggttgtggttatcggactgagctgaccttatctttcgttcagaccatgagcatgaaatcaagcttcggaccatgacttggcagaagacggcctgcctgcttgccggtgagcaggtttgcttggccattatggcgcagacttggtccctctcgtgagtaaccgctcgaatatctattctcaatgaagctgacggtgttttcagcgtcctcggatgggttcccggtatcattactatggtcctctgcggattcttcttttgggtgacctcgatcacgatgcataaatatatcatgaagcatcctcatattatggatatctgtgagttacagtccgatatccttatacttgcagaaaactaacagcttaattcccaggcgatttcggataccatgtattcggacagagcaaagttgcctacatcttctccgcattcatgatgcttgcgaacaatattctcctcatcggattccacgtcttgaccggcgccaaggtcctgaataccctctcggatcactcattgtgcactgccgtcttctcgataatcgtgactatcatgggaatcgtcatgtccttcccccgaaccttgcaacatgttagcctcatgtcaatgttctcatgtgagtagctgaatcccccagctctcagatgtcccaactaaccatttcagccgcctgcatgggtatcgcagttattctcttcctcgtctacgccggtatcgaaaaagcccctctctacggatacaacggcagctacccgacagacggagccgtgaggacctatgccttccctctaccaggcaccacatgggtcgcctgtatgaacgccgtgatgaacatcacctttatctgggtgccgcaaatcctgttcccaaccttcatctcagagatggaaaggccgcaagatttccccaaagcattggccgttctcggcgtgatctccgcgatcctttttatcgccccttcagccattggattccactacctgggccagtattccaccgctccagccttcggcagtttgggcgtggtgtcatacaagaaatcgtccttcggcttcgtcatcgtccccaccctgatcatcggcgtgatctacgccaatgtgactgcgaaattcctctacacgcgcatcctcggcaagtcccgacactcgcacagccacaccgtgcttggatggactgtgtgggtgttgatcatggtagcgatctgggtgctcgggtttgtctttgcagagatcattcccagcatgggtgatttcctttccctcctgagcgcggcctttgattccttcttcgggttcatttatttcgccgtcgcgtactggcagctcaaccggggatcgctgttcagcggtctcgggagaaccgctaacactctgctcaatcttctcatcttgatgattggtctgttcttgctgggtccggggctgtatgcagccgttgaggccatcatttctgactactcgggttcggtcgagcctgcctttacttgtgccaatatggctatctaaggggaagtcatttaatagctttttatgatcggatgggtcatttgttgcgatttttttatgttttatgatgacttcaaaagaaaagaaatgaactggaatatcaccagccggtgaaaatccaggtttctgtctatcttttatctgtagagtccctgagggcaactacctctcaattccctattccaccctccgcaacccgggataagtataaatactaacaagcctcggccctccagaatgccctctcctcgccgataaaagtactaacaccaccatatctactaccgccgaatacatcgacagcagcactgggacccacaagggaagttccgttaaccgttaacaccaaccaagcaccgatcacacgagccaggatatcaatctcccttaaccctccacatcaagtccttctctctaacaagaagcaccagctatatgctcatacctcactggactaagcccgcatcaatcaaaatcggaatcgcccgatcctcaatccactccgtgcatttaaccaacggccgacgcggctccccaggctcataaaacaccactggatcccaactcttaaccggctccgtcctcatcgccactgtattaaacgccttctgcttcggcggcgcgggaacagaactgagaatatcgttccagttcttcgggtagttgagagctcgggtatgtccgatgagctccttgtagaagaagttctcgtctgtttctgggtcgtcgtagttcacgggctcgtagtgcatgcctgtgactatgtcgcccgtgacgtggtgcttcgtgccgctgcctgggccttgggcgtttgtttgcacgaagaggatggtgtggtagcggggtgagggcatgtctgggtcttgcattgagaggttgagttttactttgtagactgggtagatttgggaggttgacattttggtgggagtttgaggcggatggagattgttcgaggactggcttgtggtttgatgctgagatcgtcctttctttaatgcctttctttctccccgctttttctgctggcaagtttggtatcacgaaatgcagctagccgcccaggcggattggaaatagtaatgtatctctctatttagtatgagcggttaagatcttgtctgacaatcaatgttggtatttccaatatgtccagtctagcggctatccttggtgcattcttacccctcactttcgactacacactcgagaattcccagcaacaagcttatcgccacagttctccgcatatagagaagagttcatttgtcttgctttccttctgatgctgctagatcagaaaaaaactgttgcggctcggccagggtcgttgaatttgcggctgcctagcgatcatcaccttgaggtccttgtccgaggcttttgcagaggtcaatctgctatagagatcaatatcccgtatttgctctagccaggattcatggcagcgacgatgggtggcccatccttcgtagtagccaacgactctgtccatgaagaaatctttggagcaggtctcgtgtttgaacgtcaaggttttgttaccgcactaagacatgtcagtcgatacctgaaatatcgagatattggggttgttcaactatagctctaatgcttgggttagtatttgttcacaacaccataggtgctctccgagtaaatgcgctagtagagcgtctttgttacatcgacgttttttcaaatttcacttgtagtagcacaaacttcgaactattcaaactccaaaaaaggggcatcaatggcaacagattaagcgtcgaggctctactggttatagttcagctaggttcgtgtgatggcaagaagagtcagggcattttcaagtctcttttctctaatcgatctagtagacactcgcaaatatagaattgagttctgttaaagcagagggttcgggcctttccggagaagaagggatcaaaactatgaaaatgaagctaagcacttggcgtcggtaaagagggtctcaattttgacatggaatatccgaggcgatgccgccatcaagtactccgtacctcgcctaagattagctcggctctacagaatcttccgactgttgcttcggcttcaattttgaggcgtgatggtaattttcgcgtggcaatcatttcggcatctcagtatcagaaggtctgactcatttctcaatgcatgccgacgttgagtcgtagcttcctacaccccctccaagatgggatcttcaataatagcatttcaatagccttcgcggatcaactcagcacatgtagctacctctcggggccagctgcgctcataaaacgccaggtcagccagacaggcttggtcgaggttttcaatggctctggctcagtcttcatcgtatgtgctgccatatgagctacgatatatggcccatccccacggccaactccaccccaacaagattgaaagtccaagaagcctggatacaaacttccaccctagttttgcgtgttgtcggttgcgtcgctcaataagagtttctttgggtggaaactcaggtgagcgctatggtgtaggccatgacttgtcatgagatgtacgagtggatggggattatagcacatgatttggcgatgttgtgagtaaatgcatgtggttgattggaaactccaggtcttgcatgttctttttatgtctcgcttacctcgcgccggggcgtcgagtccttcaccacatggactgatttatgttcagaaattattgctaagctgttgagtggtcaaaaagagaataagaaactaatcacctattgatttcatctccaaaaataataaaggaaatagggtgttaattgcatacaattggcccggcaacattcttcacctcgaatcatgcgcattcccaacacctcccctcaagtctactataagaatcattatttccttgctcatacgcaaagagatgtaacagatgtcttttaaagaagcctgtgccgtgtccacttttagcccgttgcccggcctccactctagccccttccaaccaatcttgacactatcattgtcgagttgaacaaaccactcaatcgcatcagttttggcacgtaactcaaaatgcggggaatgcgatggcgctcgtgaaacaaatatattatagttgcatccgctataattagtgttcgtgttcctcgtgttgttagtggctgctaggagagtatgaatgcagggtcacgaacttacgagaaaggatcaagcaatatcccagctagtttgtaatagattccttgaaattgttatttttgtaaataattttggagatctcacttgtttggggtctataatgcgaatgccacggcgatcgtgttggatcagagggtgaaatacgagtgaaggctcatttcctcctgcaagggaaatacgaagacagaaatagcatgtagattttctcatagcatagcgtgaatgatttgtctataaagacttcaatgttcatcgccattcggattcctcttctccaactcagcccttctaaaccacagagaacaagaactctctatcacaaacaacaaccaaacaattcatcatgcatttcatctccctcattgccttctccctcacaaccgctataacagcggtcagcgcctaccccatcaccggcgacaccgtcaactgccgctccggccctggaacaagccatacagtcgtcaagacatacaaaaaagcccacgatgtcaaaatcacctgccaaaccaccggagactcaatctccggcaacaacatctgggacaagacctccgacggctgctatgtagctgactactacgtgaaaaccggcagcaacagctacgtaaccgccaaatgcagtagcagtggcagcaccagcagcaccggcaccggaaaagccatcatcgccgcagccgagaaggagaaaggcctcccgtacgtctggggcggcggtggttgcaagggtccctccggcggcggctttgactgctccggtctgacacagtatgctgtctgccaggctttgaagaagacgattccgcgtgtcgcgcaggaccagtataactccagcttgggcaagcggtatcctcgtgcgcaggctaagcctggtgatctcttgttctgggctactggtggtgattgcaagaacaaggttgtgcatgtcggtatctttatcaatgataagacgatgattaatgctgctcacactggtacgccggtgcgtgagcaggctatttggacttcctatggtggagagagtatctgtccttatgttatgaggtatgtatatcattcttgggttttgggttgtcatactaactggtgtatagattcacttgagctttgggtatagctggttggcttgaatttcttttggagattccgattgagagacgattcctgggaaattcagatatttgctggttggatttgtgtgatactctagatagaatgttgaaatggccttctatcttcttcatctattcttggtagccaaatacctaaggtgtgtaagtgtcaattgaaaggaaggaacttatgagagatgatattgggaaaatggacatgtgacatttgcgattcaaggaaggtgcggtggaactatcacaagttaggaaggcaaggtttattggttgtataaaaaggtccctcctccccttcctcttctcttcttcctcaccccatccttctagccaccatttctccgtagcctcatgagacagcgcaggcagagggtctcgtggcacctgctgcctaagctaccacagggactcatgtatttgatatgtaactccacaagtgacggctctaccttgaaaactttttatgttatagaaagtcctccctatgaatgtagcaaggaaatggatattgatatccgcagattcttgagccagttgagaagcccccaaccccaaatataccggagatgaaacgtgacactactgttcataaaatctctctgcgattacctgttgaagaagccaacattttatgtcgatgagcttgctgctttcctctggaatggtgcaaacatagattcagtctcccaattctctttgattgtagcatagtatggtccagccattttcgactcgcaaattgatgatagaaagaaaatcgaaatctcagatagggcgtgttttccgtcaacactgttgaatgtcacgctgtacactcacgtaactcgattgatagaccgaaaaagcagttcactctgtctttaaatagcagacaatcctcacaaattttacggctgggagaggttatcagaatacttgccccacgcaaagtagcttctggctccattgttgaaatgcggttgaggcgtctctgaagtgtttttctatcttcccaaagctgtatctgaccctctcgagcctttaatttccggatttcgggacgagttccaaggagggcaatctcatcatcaacaattgacacttcacgtttcaagcgctggaccagtgcctcgtcatattcgtccccaagcaatcgatcgtctttgtcaaatagcttaaattcaagttgctttctatcatattggagctgatagagtcgggggatgctagggtatatagactccagttccgatattttcaaattttcatctgcgatttctttatcaaaccgggagtcaagcttcttgtcctcttctagaaaaacatgccggtcgagaaaataagcgatcagttgcttttccgcgtgggacgcaaaaaactgtccctggataccgtggtccttgcgagcatcaacagcgagagtatgaccaacgatggtggctagtttcaggaccctatcagtccaatccttgccgctcacccgtgttgaaggccattgtgagtgtccccagccactcattgccgctatagatgggaaaggaatgcccctttctagcaaagcaattgtcttgtaagatgtagatatgggatactgtcgaattggaccataaagagtgaccgattggccagtagatgaccttctgaaggagtgagaggctgtgtcgggatattgtagtacgagatctgccttggtgtgcaaatctccctcgtcaaggatgcgcgcaatctctcgtcgatcaatatctcggttgacgacatcttccttgtatattggctctttcggatcgccccagaccccacccccaaccgtgtgcctttctttgcggttcttatgagttggtttggtaagattcagggctcgttgatttttgttatcacgcaatgatcgatcggcaccccgagaaagcagtatctttacattctccagcctaccccaaaggcaggcttccataagcgcagtccgcccgttcttgttcgttgcgttgactcgagcgccaaagtcaaggagcaaggagatcatggatgatgttttctctcgagaagccataatgagacatgtatctccgtaataatctcgcccgtgaaggaaaatgggtttgtcgactgattctgtaaggtaatgcctcacttttgatgtttcaccctgggtacagttcgatatagcgaaaagtatgcgacgttcctcgaagggctcttctccttctagtgggatggtgattatctctttggagtcctcgaagctgatctcacgattgttaaacccacttggcatcctcgatagattcatattggacagttgatcagacaaaaatgactcatattcggaactggctaatgcttcaagagcgttgatattgataaaacgtgctctagctttgtcaatctcataggcaacaggaaatctgtaccgatatgaaggtcgaggaaagccacaacgcgatacatgcagggcactttcgtaggatctaaaccgatggtgatggagctcctcgcaataggggcatttgaggtagagataggaatccgtccaccaaataacatcgacgagaggattggcttgagtgagggacatggtcctctgatgaaatggtaatatgggacgctgtggttagatagtcaaagaagagaaattgtgactcagaactctgcggaaggttagttagttatatcattttacaccgcattacgaatgacgaaggaggcggaaaaaaatacgactcgcaatttagagctcttttcaatacggtctgagtcaggttgggcgcgagctgggagaaaactcaagtgccattataagcataactctatgtactaatgtgtagtatcgtacgcagactgtgatgctcagcgaaagtgcgggagtgcaggccggcgcgatcttgctatatcaccagaactaccgatagagtctatgcttccatgagaattacagtacggtgacaatgacggttgtcattttccgatctttataaagcgggggcgggggtgtagatggccgtagccgaagacgcgcaagtacgcgcagcgcgtagtatgaacgcgcaggtagtcatctacacccagtctacgaacaaataagcttgacttggacttaatttcctcaattctatttttatatgtgttctatctagggaatttaaaatacaagttctgtttgaagagcttcaaaatcttgaaacatcccgaccaaagaacttattcactgtccatcggaaagccacacgcaacttgttgcgccagctgatagacatactgatgtatgccatcttccagataagtgatgcagtacgtcccttgataccatctggcaggaatcgcttcggactccggtcagcgttacggggaatctgcatcaacgcgcgttcgtcaccgatgtatgccatggtgccgaggtcgcggaaagagaacggcggggtttgaccgaggtcattcttgttcaaacgctcagcgagccacttcgcttcttggtaggtagcctgtgctgtggcagggggggcaccggtctctggcatggcgttgtcacccaatgcgaacacgtcgtgtagaacggctgtctggcctgtttcgttttgcagctgtacccgcagatgtccgtcgacgagaaggggtccctttcggggggctttcttgaatttccacgctgcgtgttcggcgtccacggctttttctgaggtctcgatgctttggactgagtctgcggggaatgcatcgactgtgtcaagcgattcggtgaccagttttgtcatggcattacccgttgcccaaacacacattccaatgccttgctcgccgtcttcttcggtgtgaagagtcagacagcccttgggatccatggggtggggcccaggtgcgccaggggcaccccagcgcaagcttttaacatgatatgaggtcttgatatcaataccctcgctcttcatggtctccatcgcgtagcgggaaagcgactcgtcgaacatcgaaagcaccttgggtgcaacatcgtacaaagtgatcttcggcaattcatgaagactggggtatagcaacatcatatcggagtagatgaaatcgcgcagggatcccgcaagctcgataccggttggaccggctccgacaatggcgaagttcagcagccattttcgcatctcgggggaagtggttgggaggacagccagctcgaaacattctcgcacgcggcgcttgacacgtttggcgtcaccgatatctttgaaaaacatggcattctcccgcacaccgggtgttccaaacgtgcggctgacggcgcctaccgcgatgataagcttatcgtagggtacctcgaacacttctccctgttcccattgaagatgcggctccatggccggcttattcctcgtttccgggccttgctcggttattcggtaatcttgggttgtgcgaggagactcggtgacaccacttttgacgactgttgattcgactaggacggtctttcttttcaaatcgactgaacggacagctccttgaaagaagtcgactttggagcgcggatcacgcacgggctcgacaatgctggagaaatcgagagatccgctggcggtgttggtgaggagaggagtaaagacaaagtatgagcgaggtgaaattatgagaggtgcgtatttctttgaagaaagcttccgcgagacgttgtaaccaccccagccagatccaaggatgacaactcgttccctgccatcagactccttagccaaggcgggcggctcagcatgtgttgcgaggcatctcctgcttggtgtgccaactaccagggcagtgctagaaagggggagcgaactccgtacacgtagagcctcgcggcgaagaggaatcatggtactcaatggccgaatttgcatggtaatgcagaactaacgcagtgtatgtcagtagatcgagggtattatgttcaaaaaacagatctgagctactttgtaactcctgcgatgggattggtgctcgtagttaaggaaggtttcctcttccgctgacacatcgatgacttcaccgtcggcaggaccggagcgggcctggtccactcggtaggatccatattctatcgggtactagtgccgtagaatgcaggtgggaattgaaaggctgctattactgatccatctatcaagttcgtggacacccggaacccttcggagccagcggtgataacgggctgcacgtgccgccggagacgatagggaggtgccagtacatgttgttcattcggcaccgaaaggtttggcggatgtctataagtcgagcaaaagcattccgagggtaacttttgaaaaagaggagaataccgccgctatatgagttcgcggtgagtgtcatatgattctatcatatgatgggggttgacctcgggagctagggcttggcggaatcacatgaatttgatacaaatgtagtcccgagttatttaaggatcaccgagattccaccggcatggagcttggacgctcccgagattccaccgcgtcgaaacttccgtgtctccgagcttctaccgggttactccttagagcttggatgcagatttggttttctaggttccgggttgttttctcgcgttgtctcccccttttgttcgaggactcccaaggttgacagctgcccaactcatcagcactgcggagagggccagcactgcggaaggagggtctagttcaaggcttgtcccggtcataacacgtctagaaagcatccgggccactgtcacgacattgaagcggatcggtcggtccgttcgcatcaacggggattccaaggttatcatgcctccctttggcttcacttcataggcggtgagaaacgcgatgacaatagctgacacatcgtgcgtggcgtcgtgtggcgcagacgtgtatctggagtggcgcggccctttctgtgtcagaatctcggatttagggggagactacctaatcgggatgttctttttctccgctgttctaccccatgtatctttattcgcccctccgagctttaagttcctcgaaggtacggagatcatcgtttaattcatcgttatcaccgatatattgctccattgggatgaattctcggccccgagctctgctggcgtccagcaggttaggcagcgttgtacgtatacttccagggtggcggtttacatggctgcctgagtgtacaaccagttgtatataaagatcatgttgcttccgtgcatacctaatatcagatcaagtgtcttcactgttcttcgctttactttctcgccttttgatatcttccaacgtatcattttctcgcgcaagtcacatatcttacatcaaacaactacttcaagatggcttccatctaccaactcaaccaacctaccagtcagttttgggactttgtcaacggcaatctagaggaccatcctttctttgctcctcgcggccaccgcggacaccacggacgtcgtggacctcgtggatgggataccccccagcagagcgacaataccaaccgagacgctcaagcaggtgaaaccactgagcccaacgccgacatggagaaggacgaaacgtcagcatcggactctgactccccagacaacaaccatcgctgcgaccactgcggaaatggtaagggcaagtacggtagccgtggaggtcccgaccaccacggtccaggcccattccgtggcagaggaggcaagggcagacatggacatggccctcacgctggcccctacggccaccacggccctcacagcaccaaggaattctcacaggactctgaaacaccccaagcagtcggtgagctggccgacgcctctaaagagaacatcgaaacctcggcatcggactctgactctcctgacaaccaccgccaccaccgcccccgccccgggggnnnnnnnnnnnnnnnnnnnnnnnnnnnnnnnnnnnnnnnnnnnnnnnnnnnnnnnnnnnnnnnnnnnnnnnnnnnnnnnnnnnnnnnnnnnnnnnnnnnnnnnnnnnnnnnnnnnnnnnnnnnnnnnnnnnnnnnnnnnnnnnnnnnnnnnnnnnnnnnnnnnnnnnnnnnnnnnnnnnnnnnnnnnnnnnnnnnnnnnnnnnnnnnnnnnnnnnnnnnnnnnnnnnnnnnnnnnnnnnnnnnnnnnnnnnnnnnnnnnnnnnnnnnnnnnnnnnnnnnnnnnnnnnnnnnnnnnnnnnnnnnnnnnnnnnnnnnnnnnnnnnnnnnnnnncgggcctctgccccccctgacacccccccccccccccgccacggccgcggcggaaaattcaagaacaagggccatggaggtcccggtcaccatggaccaggtcccttccgcggcatgggtggtaagggaagacacggccacggccctcacgccgggccttatgacttccacggctacggtcatcgccctcacgccggaccttacgacttccacggttacggccacggccctcacgccgggccttatgaattccacggttacggccatggccaccaccacggtgccggtgccttcggaggtcctggacgcggtggaaagggctggcatggacatggatacggacacggtccccacgctggaccatacgatttccccggcccccaccacaacggtggacccttcggtttcgggccccgtggacagggtcacccccacaaaggaggccgcggcagacacagcggacctccacctcctttcggcggtccattcgacttcctgcgccagcttggtgcaggacttggcttccctatgaatgcgcctaccgcagagggtgttgacttcacgccctccgttgacgtcttcgatacccccgccaaatacattgtccatgtctcacttcccggagctaagaagagcgatctcagcattgactacgacgctgatgagtctgttctgcatctgtcgggtgttgtctatcgccccggtgtcaatgaggatttgcaccaggctcttgtaatggaagagcggggtcagcacgttggtgtctttgagcgcgagatccgccttgggactcgtgttgtcccggctttgattattgttgatggcatctcggccaagttggaggatggtgttttgaatgttactttgccgaaaattgtccaggaacctgaggttgggaagaagaaggtttttgtggaggatggtgccttggagaatgagaaggacgccatggtcgtcgatgagaggactctcactccggtggagtctgaaggaagcgaagttgacgatggtgagaccagagagtatgtcaaggttcctgtgcagtgagcacaggtcgagtttctgggtttctgagtttgagtttctgtgattttgggtcaattggagttggagttatgaatttttgatttcccttgtttaatatttgaaattgttcactagttatgggataataaatcgctgctcaaggtcgagtggcagaaacaccaattttgctcgtgctgtaggctcctgtagaccagagtaaatatttatcagtatgtctcatttagaatgaataaacagtctagatctagaggaatctagttcaggttcaaggctatgggctatggttcgatggttattgtcacgccgagtgctgtttcctaatataaagtccaaccgtgttccccaattagcatcaattaactaaatttctctcaatattcaactcgtcttattccaagtgatgcatttgggcgcgttcattgttaacccatgcacttcgtaaacctctctgtggcattccttctatttcctttatctctcgcagacagcttgccgttcagattttcctttgttggcctgcagggatgcttcttctactttttggtggatgagatctgatggagctatatagagagcttcatggcagtagctcgatcctcatcatccatccacttcaatctccagatttctggttgatcatcctttttcctagtctgaaaactatatcaccacgatgtctatatatatatatctgaggatacaatatttccctttcagccgctgtcatcctcaccatcttctccagcgctgcgactgctcactacaattatcagctcatcaagccaccatgctgccagcatcgtgacaaccaaaaacccaacccggactaggttgggcccggagtgaagtaccagcatggtgctagattccgcacccaacgcattgggatcggcagaataggtatgtcacggttcttgttttactctgtaaaaacaccactaactctcaactcacacaatctagagctagccttaaagattccctagcacagttgactctccgcgcatttgattcggcgatatacctaaatcctaaggacacagacggcccagtcgaccttattcacatcgctactattagccgcggctagaataagaccccctatcgcttccttataaatgaaaaccccacacatgcggagcacctgagcttgatgtcaattaagaggataactacgcccctagtgagaggagatatggtctcttttctcttacattgcgatggtaagtgaagcccctgtcaccaaaaccggaccgtaggcgtttgctaaccacatctcatcttagatgagcttcatgtatacaagaggcgggcagaaaacagcccaaaccagataaggggcaaaataagtacaatgccgaagatgagcctcgccttctgggaagcgtccaaaggatcattgctcgagtccatctggtgagcaaccgacagattcttcctcgtcggaagaagctgcacccagagtttcggcacgtagtaaagcagtcagggatgcggtatgttgatcgagatgatctgtgatatataatgctaactttacatatttaggtcttggctcgagatgggaatagatgtgttctctcgaggttcggtgtacatgggttacatgtatctcacattcttcctttcgagttgaacaatggctctatgcgtgaaacagactcgaacataaccttcatcgtccagttcatcttcttcggcttcttcgtgatggttgcaaagagcttgcacttccgcatctcgcgtcagtcaatctccagatcgcagtcagatcgtggttgccgaagtgatccccgcattgatggttgggaacttaaagagcgacttatatgatccaaacaaagcctagtccggagagatctggatgaatacccgcgtacgagcaccaatcgattaggataggacatagcagcagtcgaaatcgacaaagatagagtacggcccgtgagctcttcatgtacatctttgatggattgtcggtgatctctgatacctttgacgagcatatcgaacatttaacccttgttctaggtgtgcttgggaagcacggagtctccttggaacccaagaaagcctaggtcgccttccccgaggtctcacgtttgggccagcgggtagacgcgttaggtatgtacgccggaagacaagatcaaagccattgccggtctggaatttccccagacgttacgtcagctggagacatacctcggtatgaccggcgctttgcctcaatacgtgcctcactatgcgaagaagtcagaaccgctccaggtcatcgacattttgtgtcacccgaggtgatgcatacttaaatgaacttctcaattctcatctgaaacttaatcacttttaacgctatgtagaaaacgggtatatgcaacttttgcctactcgaaacagcaaataatcacaatatccaatcattagatgccataaatcatatcatcgtaatctggagtccatactaggccgcaggtcgtaacttttccgcatagtgccattgctcaatccaccatatagatcaggccgcctcgaggcccccgtgccgcgtgtagaaacaggtagcagaccaccaccatattccacatcgacactcctcctcatgcgcggtaaactcataattttctccatctccaaagcctggagcgtttcctcgcttcgttcactcttcgcagacaccttcgcccggttagacaaccagcgtcgactgcccacgcggaagaaacccccgatatcatcaacggtgagagcgacccagacaagcgggatggagattgcaaagccaataccaaaggtatactttgccacatagccgagattcaagctctcgaattctttcaggttgatcgtgaagatggaggcgataaacgacaacggcaggaagacaatagtgacaatagtgaagaccataattgtcttactctggcgggttgtaccggcagcctggtcacgggcgaagcgggcctcgaacgcgttcgcgtgtttctgtttcagatcgagcaggtccgtgatggagtggtagatgcgctcggcttgtttatccatgcggtcaatatcctttaggtgcatgtcgatcatgcgctgctggtctttgaaccgtttcttgacttcgaattgggaccggtgctggccttgataggtctcgcagacgacttcttggaagtcgagcaggacgttgttctggtgctccagcaccgtccggatcatgttcagctcgtctctgatgtcctttgtctccgctaggagattggtttcctgtccgatgtctaggagtcggtcgacgaatagtggctggccgtcctcgtcgcagtagttgctgctttgatcttgctcgtcggtcccattgtaggactttggcggagagctgaaggagccgttcagcttgcggtgacttttcagccactctgatgcctgcccggaggcgtggttgaattggttaaaaagcacggtctctttgtccgtggctatacctatagatgactcgaacatatctaggaactggtactcctcgtcgcctaggcggtgtcgatcgaagacacccgagcatcgattggtgattatcatggctagatcatagacggatttgacagggtcgcgggttttggaattgatatcctcgataatcccatccagcacattaagcgggtcattcttgggctggtcccatctctgcgggaaggccgttacaatcagattcgtgcctagaacccacatccagagttgatccaccatgaatatcttggggtctgcccccattccggggctttttgtttggtaccggtacacaacttggtcctgatcacgactcttggtatcgatattcgggtagaaaaactggtccagtgttcggcggacatggagggaggtcgttgaggacgatagatgcgcatatatgagtatttcgtctcttgtgcgcgttctctttatccccctgggtataaaatcaagcgtttccgctcgggagattgcatcctgcatctgttgtctgcgctctgtggtctcgaaatgtagatacggcatgaacacgcagacattacatgcagaaaccagagggtgagggtctttgcaaaaggttgatgaagacagtgatgacctctgtttctcgccctggcccgacttccccttcgtctcctgcttgggagtccctggtacgctacccgacttgccgcgcttcggattgttcttgttcttttttccatgcccttcgtcgtgaaaataagaatccgccttttcaggcttgctgcctgtgcctttttgcttgcgggcagggctatccatggcccttacctgcccattctcagacgcaggctcctccggagtctcctcttcatgtcgacgcagcatcgtccgcggcgtattctgacacaacggtcgcataaagtgcgaatgagtcctttgaccccgatgctgatagttgaaagacttctccagccccttgaacccatcaacatcatgtgcgccctcctcaataaaggacttggtaagcagagcttccacccacgccatattgttcgccggtaagtgaatccaccggaaatcagtcccacgactatcaaccggcacagtggtaacagcctgtttcctaggattctccggatccctcccataaagcagattaaataccgacatgcgcttaacccgattctcattatggaagtttccaaagtcaacaacagtagcatcgaacgccgcacaagcctccttgacaccatcagatagactgtcgacattgttaaacggcgccagcaacagcacaatatccttccgcttgaactgcgccgcacgcagaaacggcgtactgccaaaattatccctaacccgacgtttcagatcaggcttctcaagaagacactgcacgacctcgcgatggccgccctgcgcagcaagatgcagcggcgtaatgccattcaaaagctgtgcgttgatatgcgcgccttcgctcagcagaatccgcacaatcgcctcacaccccttatcacaggcattatgaagcggcgtccagccaccatcactagcagcattaaccgccgccttgtgcgcaatcagcagctgcacgatatccgcacggtcatgagccgtagcaacatgcaacgccgtcttaccacgcagctcaacggcatcgatctgcgcccccagcccggacccccgcacctccccctctttctccccctcgccagcattcctcgtcaacaacatctccgccatcctccaattccccgtcgcacaagcccaatgcaacggcgtccgccccagctcatcctgccccgcaaccccatcaatagcacactccgtccgcaacaacaaccccacaacctcctccccccacccccaccgacaagccctatcagcggcgaggttatgcaacgcgttccggcggcgcagatcgcgctggttcacgtccgcgccccgcatgataagcaggtgcaggatatcggcgtggttcttccacgccgcggccatgagcgccgtgnnnnnnnnnnnnnnnnnnnnnnnnnnnnnnnnnnnnnnnnnnnnnnnnnnnnnnnnnnnnnnnnnnnnnnnnnnnnnnnnnnnnnnnnnnnnnnnnnnnnnnnnnnnnnnnnnnnnnnnnnnnnnnnnnnnnnnnnnnnnnnnnnnnnnnnnnnnnnnnnnnnnnnnnnnnnnnnnnnnnnnnnnnnnnnnnnnnnnnnnnnnnnnnnnnnnnnnnnnnnnnnnnnnnnnnnnnnnnnnnnnnnnnnnnnnnnnnnnnnnnnnnnnnnnnnnnnnnnnnnnnnnnnnnnnnnnnnnnnnnnnnnnnnnnnnnnnnnnnnnnnnnnnnnnnnnnnnnnnnnnnnnnnnnnnnnnnnnnnnnnnnnnnnnnnnnnnnnnnnnnnnnnnnnnnnnnggggcaggatggcggggtgtttctcccccgcggcggtcatgagcgccgtgcggccttctttgtcggcggagttgggacaggcgccgtggtcgagcagcagacggacgatttcgtagtggtcgcgctcgacggcgcggaggaggggtgaggcgcggttggaggggacgtcggttttggcgccgtgcgtgaggaggtattctgttgcggcgatgcaggctcgttcggcgctgcgcattaggccgatgcggaggaagttgtcgtttagttggttgtactcgtgggcgagggctattgtcttttttagggagtcgatgtcgttggattcggcggcgcggaggagccgtggctccaggcgctcgtggctgtcgcttgttatgcttgaggctggcattgtggttgaggtgtgtagtggtgagggaattgcggtattagattatatatatggctgtgtatagatgtatagcgtgtcgttaatccattgctgtcgtttcttggtgagttattgagactcttctagttttccctccccggtaggataagcgtttggagatggatggggaggagaacttgggacaaagctagacttgaatgaatcaagctcaagcgccagcagatggcccttttcccggtctggaaaggatctgcggacctgaaagtacttcgtttcctcagccccaatcctatgggggattttgtaaccgacggcgaaaatgaggctgtgtggctgatccgctcgtatcgcttgttttagtaggtttggccccagcatatgcatgtttcaagatttgactagttggatcctttgggaaagacgacagaaatttctgtaagagcaggtaaatccagggtatggcagccttggaaggtccaatagaatgtatgttgtaggtacggagtagagcctggttaacatagaattaagaatctggtaactcaagccgtaaccatggatccgggacaactcaatggccacagaactacaaatccaaactatatacagccagtaaacctcatacgaattgtacagacgttagaatctatatttctatcgggcactttctagtcacaaactacgggggatgtggcggggaatccaaggcgaaaagaaaagggaaaaattaaaatgacaaggtgaaaagaaaaagaaaagccccctccttcggagatgctgatgccgatatgctgataattatgatgtgcttctcccatgcatgccgcccccgatgaattaaaaagttcttgctttttgttttcgcttccctgtgcatcgcgccgatcccgcccagtagtttatgtcacaaatgcgcctatcaacagaaaaattaaacggtcaagagtgtggaaatcagaggcacaaacgagtttgtattctgaataagcagaccgcatcatagtgccatgcaatctaaccatagagagaagacgcaagacaaatggtatctagtgcttcttcttgtccttctccttcttcgggacttccttgagaatatcgtcgaaactcatgttcgggttgaagcgactattcggacgtgtaggaggctcgataggggcaattcctgccgggaggggcaaggcttccaacccagggtagaatgagtggcgatgctgctcggcccgttgggcagcggcaggcgagcgcgttcgtggaatggctggaggcgggggcgtgagcccaccagggaccatagggtagggatccgaagaagagccagccgatgattgatggcccgggtaaggtgatgatatagaggactcctcatcatcgtaggtggcatcttccaccataggtggatcgaaaagagcgcccgcctcggcccactgctcggcgacttgccagcaatgactgcggcggtatacaccttccactccgttgatgactacgtccgatggcatgctaacaacgccagcaccaccggcaactccgaaccagctgcgagcagtcttggtgtcattatgaatccagggagcaccgccacgtggagcaatgcagaggaaatactccacgccctcgttgaagtggacttcagggacatccaccaccagcatgggcagggcttgaatgacggcgtagaggaagatccactggccacatcggaggtcggtaatgtcattagcattcttgccgtgcgcggaacgacgctcgaactgcatgaagctctcgatgaaaggagtgggtcgcatggcctcccgggtataagatcccattaggacagcattgatgtcggagtccttgagctttttgacgctctgcttagcctccttcttggcatccatcggtttccgatgtaagggctgcagtgaaggtatctgtggaatgtcgaatggaatgggaggaagtactggtggtgtgctgcggtcatattcggagaggacctgccgcaaggcacgaatggtcatttgcttgtaatcagatgattctgtcgtgtcattgcccgcacccgaaacatcaattgtacgcgtcgtcagagacgtgcggtcaaccattaaatcgtagagatcggtgaagtcgtggtacaaatccagaaggagaagacggttgagtccgttctcctcaaactcgttcttcttcgaccgagccttgggcggccacgagccgtatttctctcggtagtagtggattgtaaagcggcggaattcatggaatcccgtcctccagttcttaaaacgcacaaccttactttccggggaagtagtcgagttggcaacacccgagaaaacggaggggaaatcgaaatcttccagtttgccgtagagaccgcgcagacgggtgtccaaatcaatgaacgcgcgctccatgcgtttctgcgtgatagggtggatgaaggtatatttagggctccgcagttgcttgagctcatccagctttcccacaccgtggacaaagccctcgacgtacagcggatagtagcgcagacgctcacccaaaacgatggcctcgatcgtcttctccctgcttcgacggacatctgcgaggcgcaattcttcgcagtagttgctgaaactcgaggtggcagtctcaccaaaattggacgcatccaagttggagaactcaaaccgggccaaaaggacggccacgtccatgaaaatagagaaaagagtggatgacttgggtgaggcgattaaagactggccgagcaggaacgcgaaaaggttgcggaacaaaagaagagtctctgtgtcctctggaccgagccttgtttgtgggttggacaaatcgcagttcagcggaatggggaggtaaagatggagttcctgcacttcctccggggtatcttcgaatgccatcctttggcttcccgcactgtcattatcgttgtcattttcgggctgacggtccaccggtgacatagggggggacatgggagacccgggattgagtgacatcgttctagttggctgctcaaggccgctcttgccatcatttccgcgggctagaaaagtgagggagggtgattcggcaaatatggtggaatcgaccttgaaagacggagggtggccggtagtctgggggaacatgtacacataagtgtcaccttgctcgttccacagttcctggatctggaaagtgataagaaatgattaacgtttgcacctcaaaacaagtgatttcgcgtctgcatacctgttctcctctagacaatggacctaaatcataaacaaccttctggtccagtcctgcgatccaagcagccggaagcattgcagcaggccgcttatcggttgagctggcgcgcgaacgaccgggcatccagcttctgcgctttgacggtgtgctagggcgggaatctgggttggatccagggatggtcaaccctgccgagctggagggcctgctcatatcacggcctctgctctgcggacggccaatgggcgaactcggcacgctgttggccagatcctggttcacctccagcagtgacggtggtgggggtaggctctccatatcgaggctatcgggcatggtccttggctccgaggcatagacggcattgggggttgagacatggcgagtgggttttgagctgctccggcttcgtttgtcgctaacgttttctgacgaattcaacactggcgaagacgcaaccgaggattgggattcccgatcttttgatcccagcgagaacagagacgaaatccgcttcgccgacttaacgggagccgacaacatcttgggtgatagagatgttgggagaggatgagtgttttttttttcggggatgagagcgacccggaggtagagaaggttaagcccgcatgtgagccctgggggaatgaagtgtgcttggcaggtgatggggggaggcggaggtttagggggttgtggaatggatcggcaggagggattggaagaatgataggaaacctgacaccgttcactgacgagaggcgaaaaattagaaaggaagagaatgacaaaagggagagaagctcaggagaagatgagaataaaaggcacaaaagctaatatcggagccttaatttttagatttcactattatttcacggttttaataataatttacgaatacatgccagatgcataatacggcctattgccaataatagaacgagcacgatgagacgagtggttccccggctgtgcatgtcttggatgtggagacaataaaatacgcgatttatagaagagaggtaggtaaccatattcaattgcgttatagggagtgtaggagaaatggaaacgatatccacgtctatcgattgtgtatacatgggttggagtaaacaaataactgtacaaagtgcttagggagcataacccaccttgcaaggacccaataaaagcctttatataaaacacgatcatgccgctgtgatccgacataactggggataccagggtatgcaccgtatttaagaaaaccagtagaaagtagtagggagtatgacgagacgtacagagttccatccgacaatatcatagttgccctcccccgtgtaaaatttgatggcaaggtcgggaaactcgcgaccgagggtgacagtcgagggaacaccggggttttgaggccgacgcttctcaagaagtcggacttggggtatggggttttggatctttgtgcacaatttggcagtcgtatccatcaattatggcggtttggccgagtggtctaaggcgattgactagaaatcaattctcttcggaggcgcatgttcgaatcatgcagccgtcgtgctgtatccttttttttggacaatttctgacaatcttttttatggttttgctgctgcggagtacatggacgtaattaacagaatttccttaatcctagatttactatagccctcgagctatctaggaagaaaccaactccgttgagccgaatagtctactaagatttcatttcttatggagatatgtttcacgagagttcctagtatttatttttagcgagaactattcaggctagccagcgtagcatacacaattcctatcagctctatgatacacatttggagcgggctaccacacatttggagcgggctacctatctaatatggcggtttggccgagtggtctaaggcgattgactagaaatcaattccgttcgcgggcgcatgttcgaatcatgcagccgtcgtgctatttcgttttttaatattttattgacaatacatcatggaggacaccgctattccagtaccgccttcctaatcgggttctactcaggcgctaagcgatattcaaaatattcaagccgtggaagttcctggccaactaaatgcacccacttacaacaccattgcaagaaccattgccggaaccatgccctggaatccacgtcaacccagtatctttcacgatgagtcatggcctacaccatggcgttcatctgaattcccacccgaagaaacttttgtcgaacgaatcaatcgacagcatgcaaatcccgagtgggagtctgtaccgcacttcttatactacgagtctggtaggagtgggggttggccatggggatgggccatctatcgtacctcctatctcaacacttccgatcaagactggactagagctattgaaaagctcgacgaggcctgtatggctgacctggagttttacgagcgcagctggcaccgattcgacctcaaatgcgttgaaatggtccgcgagggttatcggaatgttatctttgaagaccccgcgttagagggcgcgtcggaagcggttatccaacgtcgacataaagaatgggtcgaaagccatggcctccgcatatctagtggcattcctcgccttggttacgcacttttgttagatgatcgctgtatacgatcaatcttggccagtgcggcgcctagaaagccatctgttatcgaacaggggctaccatggccaaagattaacgataaaccgggggggatggtcggttatgttaactttatcgactctttcttccgccccgaagacccggaaaatgactatggagagtactaccgtggattggtccgtgttcatttggactgtttagcccattttgctatctattgcgaggatcttgagactggagagcaggaatggggtgaatatgggatggacatacctgacaatgtattttatacagatggccattgctcaaagactgagttgaaagaaatgtttctttcttccccagatagaaacgttgacagaactgcgagtgtgactgagctcgagtatatcgagcgccaggatatggagaacttagcattgagtaatgtgccgggttctacctaacactggaatgacaccaataccaacggcttttttaatccctagataatccaacagttatcctctttcaaaaggtctttttggtcttttctaggatatgttagaacatgaccactaactacctccgaatattattagtagggaacctttgatacaagctatttctagacctttaagagactgcatacatatttgtataaatattgattcatggcagctgattaacctcccggcgaaaaacccggtgggcgcgatggacccaaaaacctccgtaaagagcaaactatgacaaatcagaataacatcctagtgatttcaagagaatcattggcgttgagaacgatatcgtgttcccctggtcctgggggtcgatcgtaaatagcaacgaatggaagacttgacggggccccgacaacgttgttggactgaacgtagacctcctgcaccgagtatggctgctgggtgggaatcgcccggatagcaagtgtaaggggggctagttgacatttttcaaaggtgacttcagtcaaccccatcgagataataataacaatgcgcactagaccccggggaatgataagccatctcttagcgtcttcgcgaagccgagggagggatttagaaacgcccattggggcagcgatctggtggtaagaacgcatggcctccctgtttacctataccggcggcnnnnnnnnnnnnnnnnnnnnnnnnnnnnnnnnnnnnnnnnnnnnnnnnnnnnnnnnnnnnnnnnnnnnnnnnnnnnnnnnnnnnnnnnnnnnnnnnnnnnnnnnnnnnnnnnnnnnnnnnnnnnnnnnnnnnnnnnnnnnnnnnnnnnnnnnnnnnnnnnnnnnnnnnnnnnnnnnnnnnnnnnnnnnnnnnnnnnnnnnnnnnnnnnnnnnnnnnnnnnnnnnnnnnnnnnnnnnnnnnnnnnnnnnnnnnnnnnnnnnnnnnnnnnnnnnnnnnnnnnnnnnnnnnnnnnnnnnnnnnnnnnnnnnnnnnnnnnnnnnnnnnnnnnnnnnnnnnnnnnnnnnnnnnnnnnnnnnnnnnnnnnnnnnnnnnnnnnnnnnnnnnnnnnnnnnnnnnnnnnnnnnnnnnnnnnnnnnnnnnnnnnnnnnnnnnnnnnnnnnnnnnnnnnnnnnnnnnnnnnnnnnnnnnnnnnnnnnnnnnnnnnnnnnnnnnnnnnnnnnnnnnnnnnnnnnnnnnnnnnnnnnnnnnnnnnnnnnnnnnnnnnnnnnnnnnnnnnnnnnnnnnnnnnnnnnnnnnnnnnnnnnnnnnnnnnnnnnnnnnnnnnnnnnnnnnnnnnnnnnnnnnnnnnnnnnnnnnnnnnnnnnnnnnnnnnnnnnnnnnnnnnnnnnnnnnnnnnnnnnnnnnnnnnnnnnnnnnnnnnnnnnnnnnnnnnnnnnnnnnnnnnnnnnnnnnnnnnnnnnnnnnnnnnnnnnnnnnnnnnnnnnnnnnnnnnnnnnnnnnnnnnnnnnnnnnnnnnnnnnnnnnnnnnnnnnnnnnnnnnnnnnnnnnnnnnnnnnnnnnnnnnnnnnnnnnnnnnnnnnnnnnnnnnnnnnnnnnnnnnnnnnnnnnnnnnnnnnnnnnnnnnnnnnnnnnnnnnnnnnnnnnnnnnnnnnnnnnnnnnnnnnnnnnnnnnnnnnnnnnnnnnnnnnnnnnnnnnnnnnnnnnnnnnnnnnnnnnnnnnnnnnnnnnnnnnnnnnnnnnnnnnnnnnnnnnnnnnnnnnnnnnnnnnnnnnnnnnnnnnnnnnnnnnnnnnnnnnnnnnnnnnnnnnnnnnnnnnnnnnnnnnnnnnnnnnnnnnnnnnnnnnnnnnnnnnnnnnnnnnnnnnnnnnnnnnnnnnnnnnnnnnnnnnnnnnnnnnnnnnnnnnnnnnnnnnnnnnnnnnnnnnnnnnnnnnnnnnnnnnnnnnnnnnnnnnnnnnnnnnnnnnnnnnnnnnnnnnnnnnnnnnnnnnnnnnnnnnnnnnnnnnnnnnnnnnnnnnnnnnnnnnnnnnnnnnnnnnnnnnnnnnnnnnnnnnnnnnnnnnnnnnnnnnnnnnnnnnnnnnnnnnnnnnnnnnnnnnnnnnnnnnnnnnnnnnnnnnnnnnnnnnnnnnnnnnnnnnnnnnnnnnnnnnnnnnnnnnnnnnnnnnnnnnnnnnnnnnnnnnnnnnnnnnnnnnnnnnnnnnnnnnnnnnnnnnnnnnnnnnnnnnnnnnnnnnnnnnnnnnnnnnnnnnnnnnnnnnnnnnnnnnnnnnnnnnnnnnnnnnnnnnnnnnnnnnnnnnnnnnnnnnnnnnnnnnnnnnnnnnnnnnnnnnnnnnnnnnnnnnnnnnnnnnnnnnnnnnnnnnnnnnnnnnnnnnnnnnnnnnnnnnnnnnnnnnnnnnnnnnnnnnnnnnnnnnnnnnnnnnnnnnnnnnnnnnnnnnnnnnnnnnnnnnnnnnnnnnnnnnnnnnnnnnnnnnnnnnnnnnnnnnnnnnnnnnnnnnnnnnnnnnnnnnnnnnnnnnnnnnnnnnnnnnnnnnnnnnnnnnnnnnnnnnnnnnnnnnnnnnnnnnnnnnnnnnnnnnnnnnnnnnnnnnnnnnnnnnnnnnnnnnnnnnnnnnnnnnnnnnnnnnnnnnnnnnnnnnnnnnnnnnnnnnnnnnnnnnnnnnnnnnnnnnnnnnnnnnnnnnnnnnnnnnnnnnnnnnnnnnnnnnnnnnnnnnnnnnnnnnnnnnnnnnnnnnnnnnnnnnnnnnnnnnnnnnnnnnnnnnnnnnnnnnnnnnnnnnnnnnnnnnnnnnnnnnnnnnnnnnnnnnnnnnnnnnnnnnnnnnnnnnnnnnnnnnnnnnnnnnnnnnnnnnnnnnnnnnnnnnnnnnnnnnnnnnnnnnnnnnnnnnnnnnnnnnnnnnnnnnnnnnnnnnnnnnnnnnnnnnnnnnnnnnnnnnnnnnnnnnnnnnnnnnnnnnnnnnnnnnnnnnnnnnnnnnnnnnnnnnnnnnnnnnnnnnnnnnnnnnnnnnnnnnnnnnnnnnnnnnnnnnnnnnnnnnnnnnnnnnnnnnnnnnnnnnnnnnnnnnnnnnnnnnnnnnnnnnnnnnnnnnnnnnnnnnnnnnnnnnnnnnnnnnnnnnnnnnnnnnnnnnnnnnnnnnnnnnnnnnnnnnnnnnnnnnnnnnnnnnnnnnnnnnnnnnnnnnnnnnnnnnnnnnnnnnnnnnnnnnnnnnnnnnnnnnnnnnnnnnnnnnnnnnnnnnnnnnnnnnnnnnnnnnnnnnnnnnnnnnnnnnnnnnnnnnnnngcgacgtacagctgggatgagttctttgatgatgctgatactgattgagtgaaagggtgagcacttgggcaagatgtttaagtccaaaatcggtagtattttttgtacaaattccccttggattgcctcgggggtagataaacattacagatttccagtccaacatgtgggaaattgaggggtagtaggatataccagagatagtgagataataagagttcttcggtattcatgatattataataagactacgtacggttcgctgactgcattcaactgactattgatagtacatttattatctctggtttatagagccaaagttcggatgttactattaataattacggcggtttggccgagtggtctaaggcgattgactagaaatcaattctcttcggaggcgcatgttcgaatcatgcagccgtcgtactgtatcttctttttatttttattatttctatcttacccgtcctacattactactctgtacagagtagttaagtattaagtggtctgtccaaggagtttttgttttgtctcttttcgttgggatcatatacaaccaaggatacaaggtataaatcttaggtgctggtatgaaaattggagtaccgccttcccaatctgatgcaaatacaaattctgccatatattctgcctacttttgcattttaatcacaatatttaacctaatccttacagaggaatgaagtagttgataaggcagttgacgatgaagcatttgatgcaagatatgataggagtaacttaaatttgctaggagtttacatacgaaatgtaggtacctgtcatatgcagtttaatacaaaagaggtttacaaattaggaggcggtgaagagagcggtaggcagaagcaagattgttattcaaccaaattacgaaggcggtactgaatcctcaggcaggagagtgtgtttatactgaaagggggatgttctgacaacaagggggatacatagtacattttctcaattagaaaaattacaaaaaaagaattatagcacgacggctgcatgattcgaacatgcgcctccgaagagaattgatttctagtcaatcgccttagaccactcggccaaaccgcctaattattaagatagattcaaaaatttggatctataagccagggacaatcaatgtaccatcaatcatcccatcctagtaactagtgcggagtaccactttcaatattgctcctctgcacaaagcatttgtactctatactttgtacacatagaataggatagttcttgtttcgtagtaatatattgctctacaggcattgggttcgtatttggattagatctatggtgtagagtcgttaatacttcatattttttttttatatacacctagaaacatagcatattgtgtgtaccaggtctggctaagaatgtataaaagattacctaggtgatgtggtaggctttttgtctagtagtcgaaaaattcaatactaggtttgagtcgttcaaatttcgtatgaaatggacctaaatctataaacatcatgagctctattgattttaattgactatagcaactgcaaactttgaggcctcgagaggggttaggttattcaacctgcatataccaccgggtatcgccaggtagtatataagatactctttcttatatgacatagaactacctatataatgggttcaccttactactttcaaccagacttcgacaactgataaaggcctggtcatccgtatgtcttaggatatagaattcaggcgtaacattatcgagaacgaatcacctgtagtgtgctattatttgtcatatgtcaggacttagaatagggaggcaaagaccaattagtcaatagcctgttcatatttcatatcgattactaaagacaccgtgaccattgaaccttggaacctctattattccccagtgtctctgcacttttgtattagtacctagtaggtaccatgtcgggtcagcaggcgtgatccctaggctgagtaacatataactgagatatattccacgcttagtacgatcgagttatacccatggattcctgctagtaccttggtaggtgcgcagcccaggtgatgggaaatttaaaaccttggatactgtactacaatatctacacatgtacccactatggatatatcccagtacaagagagcaacattaaaaccttggaactgcccaggtaggacctaagtactaaatcaagagcatccaatgttatttttcataaagcgataggttcctacttgtttctgctactaaatttgtgaactgatatcttgacatggatactcatggttatcaattgctagcagagctatgaatacgttatgaacatgatttgtcatcaattacggcggtttggcccnnnnnnnnnnnnnnnnnnnnnnnnnnnnnnnnnnnnnnnnnnnnnnnnnnnnnnnnnnnnnnnnnnnnnnnnnnnnnnnnnnnnnnnnnnnnnnnnnnnnnnnnnnnnnnnnaccagccatactcggtgcaggaggtctacgtccagcccaaccatattgtcggggcaccgttaagtcttctattcgttgctatttacgaccgaccgccaagaccaggggaacatgatatccctctcaacgccagtggttttcttgaaatcactaagatgctattctgatatgctctattttgctattgggctcactacccatcttctctagatacttcttcgattttctgtgtatcgttaattggaatatttctacaaagaactgtacctctattgacctaaaatctattccatctattagggatctagtacgcatattatccttaatggtccgagctattatcacgttgagcttctcgaggtcgaagtagttcgtgaattggtttttttttgtctattgtgtgccaatagtgttttatagtacgaaaagtggatgtaatttaatagatacgtaattatctactactccgtagctaggaaataattggagcttttaaacgagagacctaattagtatgtccatacggagtactctgtttcttcgtgcgtgtaaaacatgcacgtaatcagtgtgctttgtagtggctaaggtggccgctcactatatcaataatggcggtttggccgagtggtctaaggcgattgactagaaatcaattccgttcgcgggcgcatgttcgaatcatgcagccgtcgtgttcttttttttctttcatttttatactcgatccatgataccgcatgcttacaaccttaccgtgttcttattttttattttcttacaatacaccatacatggaggacgccgctattcctggcctctacatagataccaaccaataccgtctctgtgcctgttaaccccctcgaaccattcaatccccgatctcggatgcatcggtgcccacctcgccacatcaaccgtggaagcccaagctcttacccaagcattaatgctagttgggttcaataacacgcaattgatattcatgaactccaattgacatcctattcgtcatgacactcaccgtttcccccgaccagcccattgacctccaaatcggctggcccaaccccgcgctcctccccgcctccatcctttccgactccgctacgaccgtattatccactccctccattgcaaacccagccctcctctacggccccgacgaagggtacggaccgctgcgcacacacatagccgcatggttgagtgatttctatcagccccgcgagccggtctcagcgcagcgcatctgcatctccggcggggccagccagaacctagcatgcgtgctgcaaaccttcacagacccggtctacacgcggaatgtatggatggtcgcaccgacgtaccacctggccgcgcgcatcatggaggactccggcttcgccgggcgcctacgcggaatccccgaagatgacgagggcatcgacatcgcggtgcttgagagcgggctgcgcgctgctgaggaaatcgccttgcgcgctggaaacaccgagccggtaggacaagtcttgatcctatgactgagtgcagtcactgtgccatgccactgtaccatcatttgttgagttctggactgatactgcccctctttccctgcagaaaatgaaaccgcccaggccctggcgcaaaatctacaagcatgtcatctatgctgtgcccacttttgcgaatccctcggggaagattatgtcgctgcggagacgggaggcgctcgttcgtctcgcccgacagtacgatgcgctgatcgtgacggatgatgtgtatgatttcctccagtggtcggccaagccggagggagaggagaattccggggaccgcgcatgtgttccgcgtattgtcgatgtggaccgctacttggatggtggtccacaggatgaatggggacacgcacttagtaacggcagtttcagcaagctgatcgggcctggtgcccgcaccggctgggcggaggcttccgaaaaggttgcatatggattatcacaaacgtacggggcactgctgggatgacttgactgaccaccccccccttctcggatatggaatcgcagactgacccgatatcgcttgcagaggctcttcccgatcgggcggcgctccctctcatttgtgcgccgctgtcattgaccagatgttccctacaggcatcattcagaaccacatccgggacgtcctccaaccgaaatacgccgagcgctaccacaccctgctagcagggatcaacgaacatctcgtcccgctgggcgtcacagccccaccaaccgctgccgcggccggaggttactttatttggattggtctaccagcgccgttgctcgccgccgacgtagcccaggcagcgctggatgaagaaaatctgcgtttatcgccggggcatgttttccagatccccggagacccgcaggtactcgatgaggagtttgcagatcatctgcgcctctgttttgcgtgggaagagccacgacacttgagcgagggaatgcgtaggctagcacgtgttctccgccgtatgactcgtacccaggtctaggtattgtgcgccacttcacccacttcacagccactccaactggagtgtccactagacgcgtggcgcatgaaaagtacataacttcaacatatagacaatttacaacgtagccttgccagctcataaaaaccttcgagttgggtattgtacggagtactgtacattttatatcgtaacgttgaggctctgcgttgggcattactacaacatagagacgcgagttggctgggcccagggttgggccattttcagaacccaataccgccagcacattgaaagtcatgtacaaaggttgtataattctaccagagaacaacaggggcaatactaattagacacgagacaatttaggatcagaggggcaagccaatcccgagcgggtcctccgactcagggggagtaaagagcaaagcttggcctcgacactttccccctctttatttgaatcaacgccaacccttaagttgaccgtcggaaattccagaggtcgtggccttgtcctgttatgagcttggcttttggttctccgtcatcaggaatccttcaaaccccccggaatgttcatccataacttgaccccctgacaacacgcgggggatatacgccgctttgactcgacgtcgagtcttgtgctacaggtggaattacacagacacagatacatacacagacatatgcaaacatgcattttcaagcaaaaggaatgaacagccctcgatctgcaataaaaaacaaatacgatgccagttctggggaatcgcggtatcatcctctcttctcttctacacggcctgaacaaagggatccactcgagtcaagggcatggtgatacgcgacaacgtgcaatgctcgtcctgtccccctgtgagcataacccgtcgcagatgattggaatggatgaccgacatgccctgtttggggtatgaattcaggttatatagcgcgtagacccgtagtctgtttattctcgtctgaatgctgtttgtgctgttctaccccgtaccctgaacagattgacctggaaattgccaaccactcgaagcgatatctaagtttcgattcgaaacatttgcaagcgccagccatcttcagcgtttcaactgcagaccaccacgtttcaagcgaagacgctgtcaccaggccgggctttctgattggtggggtgtggtggactttagggctgtggcgcgtgtgattggctggaaaggggaagtttgcaaacgctttgccttataggtatgattctcctcccgtctctatggtcgtggcctattttgtgtcgttctttccttctcttcttcatttctattcattccattcattcattcgttttttcattcatttcgtcgggcaccactctttgtcctgtctctattttgggaaggaaccctgcattggaagattcactctttaaatcttctttgctctcctgcatatcgctgctggtcaagcgttggactcgattcttattccgatatccgcagtactggttgctgaactatctcattccctagacatacttctttctacttcgctgcaggttcagcgttatccattttcaatatggccgttctacaaacctccatcgcgatctttgtcgcccatatcatccttttgctcggtttaccagcctctttggtcgcagctgtgccactctccgtgcctgtatctcctgtgaacaacgtcttggccactaccgaaaagagatccacctcaagctactgggtcgccaatgttgagcgtcagggtgttgtcccctttgccacgagcaccgactacaagatcttccgaaatgtaatggactatggtgctaagggtcagtcattcatcttacttctataccctcgggcaatatgctaactatgtcccaggtgacggttctactgacgacactgtcgctatcaacaaggctatttcttctgggggccgttgtggcaagggctgtgattcttctaccaccactcctgctatcgtctacttcccccctggtacctatgttgtctcgaagcccatcgtgcagtactactacacccagatcgttggtgacgctgtcgaactgcccgtcatcaaggcctccgccaaattcgcgggtatggctgtgatagatgccgatccctacgaggacaatggcgacaactggttcaccaaccagaacaacttcttccgcgccattcgcaacttggtcattgacctgaccagcgtcccagaaggctccggtgccggtatccactggcaggtcggccaggctacgagcttgcagaacattcggttcgagatggtcaagggtggtggtgacgccaacaagcaacagggtatcttcatggacaacggatccggtggtttcatgtccgacttgactttcaacggtggtaactacggcatgttcctcggtaaccagcagttcactactcgtaacctgaccttcaacggctgccagactgccatcttcatgaactggaactgggcctggactttcaagtcagtccagatcaacaactgcgaggttggcctcaatatgtctacctcgccttccaaccagactgttggctccgtgttgctgctggacagcaagctcaccaacacccccactggtatcgtcactgcctggactcagaagagcatccccgttggtggtggtgatctgattttggataacgtggatttctctggctccaagattgctgttgccggtatcaatggcaataccatcctggctggtggctctgttgtcgacaactgggttcagggtaacacctacaccccgtctaagactgtcaccaagcgcgccagcgagtctgagcctgaggtggtcaccgttattcagaccgttacggagactatcatggcctgtcccgcttcctacggtctttccagcaccagcttggtgagcagcgacgttcctgccccggcgaagactgcgtcacttgaatctgctcccgctccttcgcctgttcccggtgttagtaccagcagcgattctgatcgcattgctcagacttcctcgatctctgtctccaacagtgtcctttccattctcggatcctcttctgaggcctctgaagtctctgagcccacttccgcagctgctccttctagtgaggcccctgccacttctgtggtgtctgttggttcttcgccctctagtgtggtttctaccaagcaatctgctctgcctgtcgtctccactgctgttcctgtcacctccaatgttgtgcctgtcacctctattgctgcgtccgtcacctccactgctgcgtctgctaaaattactagcagcagctctgcagttagtcaggccacccagtctggtagtgacagcagcactgccacttgcggcgcctcgggcgccgttgcctccgcacgtacccagagcactctgaagacttcttctaagcccgctagccttctcaatggaggtgctatcttcgagcggtccaagcctctgtacgaagacgtcgccgcatcctctttcgtcagcgtcaagtcggctggtgccaagggtgatggaaccactgacgacactgcggccatccagaaggtgtttgacagctacaaagatggccaggtcatctactttgatcacggtgcctatgtcatcacctccaccgtcaagatccccaaggatatcaagattactggtgagatctggcccatgctcatggcatacggcgagaagtttgccgaccaagagaaccctgttcctgtcttccaggtcggccaaaagggtgacactggctctgtcgagatgagcgacctcatcatcaccaccaagggcgccgcccctggtgctatcctcatggagtggaacgttgctggctcttcccaaggctccgttggtatgtgggatgttcacttccgcattggtggtgccgctggtactgagctgcagagtgacacttgccccaagacccctaagcagaagaccacccctaataaggagtgcatggccgccttcatgctcctgcacatcaccaagacgggcagtgcctatctcgagaacacctggttctggactgccgatcacgagctcgacctcaaggatcacaaccagatcaatgtctacaccggtcgtggtgtgctcatcgagtcgcaaaaccccgtttggctgtggggtacctcttcagagcaccaccagctgtacaactaccaggtctcgagtgccaagaacgtcttcatgggtctcattcaatctgagactccgtactaccagtccaacccgactgcgctgacccccttcaccccgcaagactcctggaacgaccccgacttctcgaactgcacgacaaactcctgccgcaagtcctggggtctgcgtgttctcggctcctcggacgtcttcatctacggcgccggtctctacagtttcttcgagaactacgcccaatcctgtctcaactctgaggactgccaggagaacatggtcgaggtcgactgttcggacgtcaagctgtacggtctcagcaccaaagcctctgtcaacatgattacctcatctgacggcaaggctctggtccttgagaagcctaataagagcaactactgctccaccatcgctctctttgagcaatctgcttagattactcttctttcctttctatcattctttttctcattctgttctcgttcattgttgtaaacaataccatttaacttcttttgtacttcccccaacgttatatgagattcaatctccatcttctgctcctatatttctgtctagacacttctttctcttaaacttttctctgcgtcggatgcgcgctttgggggtcttttgctcgataccattgcattcggtttcattcatgggatcattactagacttttgtttcctttcggtatcacaatatacaatgccatgacatcttacgacctttagacctgtagcttgtttgtcatccggagtcagcgatgttaatttccaatattagcataagttcccctgcaatatacatagcgggtagatcataaaaaccccgtcggaacccgaagccatgtgggtctgatacgtctttcgtgcttatagtctcggagtccaggttgtgattttattagcttatttgcatgatatctctggtcacccacaaccccagggaaacacggcgtactccgttatcgagaaaaggaggtaaacggagctaagagaagtgacgcaaccaataagcactagttggtaattatccttggataccattcgccaggcttatatcttctagacctcattgaaccgaatgtggctgaatcatgacagggtttatcttcaggcctaaaaagaaaaagcaaaacctcgagacctcatggcgtgcaatacttttataatgtcgatgactccctcccaagagatacagatgcagacgcatgaccaaaacgagtcgaaaaagcccagtaaaccccaacgtctcccattccggacatcatgcgacccctgtgcagcttctaaggtgcgctgcaccaaagagaagcatggatgttcgcgctgtgtcctaaacggctctaaatgcgtgtatggacgctcgcgaagaaaggggaaaccgtcgaacaagactacaactgaactcgcccgtccacctgttcatcctccgtcttctcgagtccagatgtctccagctcctctagctcccttagcccctctagcacttccagccctttcggctctccctatccttcctgaccatcaaccatcctggcccatgggcccgaatcatcaccagcccaactataactacaactctacttggtatcggtctccaccatccccaacgaccaattatccaaccccgaccgaatgggagagaacatcaaataccttgcctccgagcttgactcatcaatcaccgggtgagaatgcagggactctgcatttgcccaacccgggatatacatggcctagcatggtccggccgcgagaggtcccggaagacgaccaacacgagccttgcatcgcggtagcatgtcgaacgctctcctcgctgtacgaattcgttcaatctgactgtgtgaatggacacacagccaacgatacccaatctcgcaatatgctccaaccaccaaccctaagggaatcccccgcaaacgatgtcgtgtttcgcatgactcgatccgccacggagacggtttctcgattattgaactgcaccgggagatcctgcgcacgggatccttccaagctcctgcttctcgggtctgttcttttgaaagtcttaacttggtatgaagcactctatcaatctgagattggcgggccggacacttcgtcgttggataatcgcgaatatgcacgcttgcagccacaaccatatcatttgaatggcaatacaggtctctcgcgaccgtttggaagtatgaaagaatcaatacttgctatcccattgaccaccccgttgggtatcgatatggttaatatctcccgcgccacggagacaaaaatgaaagcccaagtactgctctgggaggtgcagatcttatctcacgtgtgccaggctctcgagcatcgaatacaggctgctgagagcatacgcggtgagaataatctgtgcggacaggcaaatgcctatttatcgcggaaggtgggcgagctgcagcgcgctttgactgtggtgtgtacgccggtaccgtcactgggatagatgtcagatcgagaggatacatacatacagtatagaccaactcggtgcctgggattttaatattaatactgaataaattatggtacattctgttcttggtacaattctcgcgcactatctagagttctcaagaaattacaggattcatcatagacaaggctctatatatcgaaagtaacctattcgctctctccatcatcgcaagcagccttatcagagacacatgtcgagatattggcaccgggagttgaacgacacttgtcgaagatctcttgacaatcgccctcagcggagaccacgcgcaccgggtgtcgcaagtgtagctttgcgcgggagttgatctggccgtgtcgacacgcctcgcggtcggagaagcaggtggacatgttggcgtctggggcagtgacgcacttgttgtaggcgtcgtcgcaggtagaggtggtttgggttgcggtgatgctggttgccagggtgagggtgaggagggcttttaggtggaccattgtggaggtttgaggtttggattgtggtagtatgaagatgggtatacttgagatgatggaactgggtttgtggcgtgatgggtggcttttatagacagtagttgcgagcaatattgctttggttgggacaaggggctgacaaggggtactgtacattgaacttcagctattgaatgcatgatgagcgatggtatacactgtgtcgatcttctgaaccccacaactcgagcatgcggtcagttggatgagtggaaatagttcctgcactgctagggaaactcgatgtagagtgtgtatgttgatttcttgcgctgtagagagaatgtcgcaagagatgctgttgtagcttgtgatcggagagattaggcattgtagtgtgcagcaatcgagatcacattccaggtgcgtcagtgtgagatctataggactgatcaacatgatcgacacaagggaaatctggcgctagtctctacctgcaggttacctgatactagttctaataattcaatgtccggtggtttcttacaagaagcacaatgttgtactgagtactgatgatttaatattgcagttaatagctgttctagataatgacttgcttggtttcaccataaaggctactcatcctgaacaccacgtaaaggtgcaagtcttgttcaggtgccacacacaggacccgtgaagctgggttaggaaggagggggagggggnnnnnnnnnnnnnnnnnnnnnnnnnnnnnnnnnnnnnnnnnnnnnnnnnnnnnnnnnnnnnnnnnnnnnnnnnnnnnnnnnnnnnnnnnnnnnnnnnnnnnnnnnnnnnnnnnnnnnnnnnnnnnnnnnnnnnnnnnnnnnnnnnnnnnnnnnnnnnnnnnnnnnnnnnnnnnnnnnnnnnnnnnnnngggggggagagggggggagggagtaatcatatcaaagaaagaaggaacaacaaacacagagggctatctccgtgaaaaagttccaaaaagtgggttggagatgaagacaatgtgggcagcagctggacagtccgtatccacagaggtcagtcggagtacgtgactggtagagcattgttacctcctcggacatgcttcgtgccacaacctaacctgatatccacagagaccaaagtcaaaagaataagaccactccaggaacgaggtgtagtgcggacctagagtggtacgaagaaggaagaaaaaaggaagaggaagaggggggagggggttgggttttataccctgggggtggtgactcaaggcaatgggggaaactgcggttggtgacgatttttgaccaaaagggaaagcacccatgagataatcacatgtgcacatatcacatggttggagacttcaggctgtgttccatcatattctcacccaaatagctctacagccagtttttcctagtcgcttgggaactatcagtaactgctaatcgtcgacattctgacagtcaatgcttggtttattaaaactgttcatcgggctgtccctcaaagagaccattggacactgaccaatgccgacgagggcccaaagaagatatggaaaggcactatattctacagttactgtatggtttcccggggaactttattcattgcgcaataaaacaagaaacagcctaatcgtactcttccgaatagaataacacaggacctgaagaacttgaagataattgaaggagggtggacttcgtgttaaagctgtccaaattgtcaagcaaactttttagagctcctttttcacggaatgctcaggcttatgggtggtctcgtagtcaacatgcacataggcacgctcaacgtcgggaagcgactccagcttaatctggagctcttcagcaacgtcgtgggtagcacgtagggatgcctccgcgtccatgacgacatccacctcgaccagcaggcgagggccagaggtgtatgcacggacggtgtcgatggcagtgatgacaggagagtgggtcatggctgaaagagatgttagtgaatgctttatcaagagctagaagaaccgaaagggaataaacataccgatatacgtgatgagttgctgcatcttggtgtcggcagtaacgccgacgagcaactggaactcgccataggcggagtgcagccacagcccactgaccagcacggacagaatgatagcacccatgggatcgatccaccaacgcagcttactaccaccgacggaagtcagaataccgaacccgttgatgaacagatcgttgcggtgatcctcccacagaatgcggatctgggagacctggttgcgcagggcccaacagtaaaagaagagggctagtttggtggcaaaggcgacagcgacggcaatgatggagggcaggtggaaagactgggtttcttcctcggagcccgctgccagttcgcgaatagagaaggcgatgatgatgaaagagaccgaggtcataaggaagcagaagcagatgttgcccgcggtttcaatgcgggcctttccagcggggaacttccgtggatcaacgcgattgacggccttgttgcacagcagaagggtcatgttggacatggggtcgaagacggcgtcggccattgtggtaaacagagagagcgatccggacgaaacggcaccgtacacctgaatgaccgagagaatgatgttcgcggcaaaactaccgtagacagcaatccggtacttgagacggttgtcgacgctcagctcgcgggcagcacgtcggtgctcctcgacgggtttcagcatgcgctcgatgttttcattttgggactcgtaaaacccctgtagcttcttggtgacgaaggcttgctttccaagacgggcagtgtctcccactatgtctcccactctccggcctttgttcgcagtggtggaatcccgtttccgcgaggtattggccttcatctgtcggatctcatcctcggtctttagcttcgaggccaattggaacggatcgctttcagaggtgtaacgtggcggcaggctttcttcatcactggaactaccagttcggtgttggtgaatggtggtgagctcatgctcaagggcggtggtggtcccttcgttgatggctagtggaggcattctgtcactccggtgtgacggtgaaccgctatgagtatgatgcaagtgttggaaggcatgaggatggtttgagagactgtggcgtagatgttcctccatgatgaatgaattgaatgggatgaattggtgaataggacttgagatgaaagaaactcttcataccagggaaataattccaagattcccctgtggctgagcttatctgatgccccaccatagcttcttggcacctcgctgtcggggtggatgtatcacggtcgctggggtcggcaccccatcaccagaattcctaattgtgacccaataaacacccttttgaatactctagaattttattgctcataaaatggcagccgtgaaaaaaaatcggacggaaatccgagctccacgagttcagacgctaaatccataatgtttgctcacgtgataaatcacgtggtcaaactccccagcctcccccttcttccatcctctgggcatctcttcacctgctccaccttctcctccaccaaccatcatcctcatcaccatcatcaccatcatcaccatcatcatcatcccgtaaaggaagtactgttctttgccgtccttgtcgccagtcctgccattcctgtgttctcataggactctccgatttcacttgttgacttcggattgggcatgtgctcgtggccaggccgcaaaagctttaccactttgctcttctcttcttcttcttttcatcattcattctacatttcacgcgagtcagggctgctcaatactatttgaaagcccgggtgggagggtttctcgattcttcgagggtcttcctgtttaatccagcgaatatcgcacaatgaccaccagatcgtcaaacccgctctgggtcctgcagaagacagtccttgtttacacacccgatttcaaggcttgttgttctgctcgccttcgtattgcccacgataaaaccgccaaccgaggatctatctcccttcggtttacggcagagcttgctaacttgagcggcagatcacaggtgctgacgttgaatatcccaccagaaatagtcgaaaaatgtgaattagcccggataagcaacgtcggcctctgttcatctgatttgctccccaagctcccggcgcccgtgaccaacctttcggccgtctcaacactgagtctgatactcaataagactggtcgttttctttgtccatctggggtagagtctttaagtccagccaatcaagaagacttagatcttgacgcatttgcgaagatctgtcaatctacatctcttcgtctacacttttccaaacgacaattcgtggaaaaagaacttaatcagctagaatttttctcgggtgctctccggagtcttcaggcagagcattttgactacgctcggcatggcgtggtgcagaaagattggcccttcagtttgttgctcgatccacccccgtattctgaggagcgggtctccgaccgggtgaagcaggtggatccacccctgtattctgagcagtctgagcaggcggttggaaaacggcccagaggtatcttgtcacttcttatcgtctgtaatttgtcattcaatggctcattaatagtatctagacctatggtcaatgtcacctgacgatgaaagacgaaaaagactgctccttacatcccctgaaccactaggctctcccacggaagtcaatacaccgagtactacacactccccgtcggcctcaatccgtcccacgtactttacgcatacttcctcccctggccgcacaaagcgtaacagacttgcgcgccttgaagatgaacttcgtggtgcttccgatgactggatccgccaacttttaatccgattaggacgggaacatctgctggccacaccacaagatgtagacagtgaccggccatccgagtctgagaaagttagatttgccaatgttgggatgatggagagccaccttaaacaatatgtcgatgaaatgattgagcgccgtctcaaatcacatattgtcgacgagattgtcgatagagccgtgagcgagtgtcgtgaacagatcttcgacgaatgcaaaatgcatgaagccggactgggtgaaaaggtcgacgacgctaactccgagatacacaatacggccaatgagtgtatgaaggaaatagaagcacaagcgcaaaagcacatgggcgacatagaagaacacgcgcaacagtacatgaatgatatcgaggatcagggagtcgagatcgaaatgtccgcggagaaaaatgccgccaagctcaagcgctggttcaattctgcccagtccctacttgatagcaagtccgagccgggcacgaaggctagacgcatttccatttgatttggtacttatctttcttaggatcgtcgtcgtgcacttagattttttattagtctggaaaggtaggtgatgaacgtatttctaaacgagcaggcctgccaaatttggtcctgggtgcttaattactatatttacgctaagatgcgggggtcagatgagttgattcttacggagtaatgcttaacagaattatatatcgggcacaacacaacgcagtcactatcgcggtccccgaccccttctacacatacccaccgaccacatttggggtgtaaaaatgcaatgtgcagtacaagtggctagaaattggtgcgggggacaatttttgtatgggggtgggccgtgcacgaccatttcaccatacaaagtgggccactttctccaaaagctgagtgacatttcgacaatcggctcagcgaactggcgaatcctgaaatttaaagctgcagccctgtcaacgcagctttctgtattagacacacgcgacttgaattttgccatgatcaactctcaagacaggttctagtccgaaggccagaactactgcggcaacgaaggtcgatatgatgttactggtgtcgcctttacactctacgagctcatcacgaacgatacttccttctcggatatcccctattgggatcgacatatagacatggtgcaaagtattgaatggatcgtcaatcgcgaacttgattcttgacgtatcgaagtttcgcaacttcttgagcgaatgggtagcaacgcgaagatccgacggggatatggaaaggtatctcaaagcaccacagcgatttatatggccggacctaccaacatcgcccgaccacgatgtaccattcgagataggcacaacctagaatggaaagccacactggatgactggccaccggtctagattcaccgcaatggagatggggcaatattgctttcgctgggagaggccaccacggagccgctcgtcactcgaggctggaaatagtgtatagtcgatcagaatactggactgcgaaatgaagatactttcaaatgattggcttcaatcttgtgtactcattacctagtcccgtggctgtcaaagagtggaaccacacggtaaaatgatcccatagttcataaaatattctggcatcctgacattatgacttcaaagattctatgctagatttgatagtgtgtgccgacttttccagctcccgactttcttcttcagacagcttgatgtcgataacatggtgggccccggttcggtttacctttttcggcatgctcaacgcgatttcactcacgcctgcaaaggttccagccgttgacacagtcataagcgtgttctcattcctgagtatagtctccacgatcctcaccaagccagcagagataccatagtccgtcatgcctttcagcttgattatctcataagcagcattcctggtgtcttggaatgattgtttcatgatatcctttgcatcctgaccagcctgctgggaaaactccgccaacgggatacctgatatattggcccgcgaccacactggcaattcgctatcaccatgctccccaacaacgtctgcatgaatgttactcgggtcaacatccaatcgtcggcctagagtgtcgcgcaagcgtgcggtgtccagaacggtaccggacccgatcacgcggctcggcgggaacccagacaatttccagctcaggaaggtcaagacatcgactgggttactcgctataagaaggatggtggacggggccatttgcgtgacttttggaacaatgtcctcgatgattttggcattgatccgtaagagatccaaccgcgactgtccgggcttctggtttgcgccagctgtgattatgacaatcgctgcctcagagcagtcttcaagatcaccaagtgtgatcttggtctggtgtgagaagggagctgcatggttcaagtccattacttctccttcggccttgcgtcgattaaggtcgatcaggacgatttcggctgcgagaccactcagaagaagagcgtaagcggtagaagccccgacattgcctgcgccgacgatggcgattttgaccggcttttgtaatcagtatgggttcaatgcatttatcaagtgaggcttcaaaactaacatggagatcgatggcaattgtaggcttctttgaagaatttcgggctgaattggattgcattgtgtgtagagctttgttttgattgcttgctgattgctttctgatttgactattagatatgatatcaatcgcgactatttatagtcaaacctcctccgtagatcgaacttgcccctgaagtgaaacgagtcaacacgtcacataattgaagctctagaatccatagagcttctcaattgtgtcatgtacagacgcatgacgaaacaaatatttttgccacggcatgatcttgctcattgactttgttttcgtcgatcaaaatggctgatatctatggagtttactcggtatatcctgttccgtctcggccgacgtggctgaagagatccaaggtagatgaactgaacttgcaattacacagacggttataaaaaagtcgatacgcatccaagaaagatgaagcagtctcatgagaactcccttcgaaacctcaattgaacattacaaaagccgttaaaatgagaatcgccgtgttcagtgcccagccctatgacaaggcatcgctggatcagtctaaccaggcattcaagcatgagatcacctatcacgaggcaggtctaagcgagaagactgctcttctggcctcgggcttcccagccatctgcgtgttcgtcaacgaccagatcaacgccaatgtgattcacaagctggcggagcatggcactcggttgatagccctccgatgcgcgggattcaacaacgtggatctcgctgctgccaaaaaggcggggatcacggtggtgcgcgtccctgcatattcacccaatgcagtggcggaatacacactcgggctggttctttgtctagaacggaaaatccacaaagcctggctacgcgttcgggaggaaaactttgcactcaatggccttctcggtacagacctctacggtcggacgatcggaattgttggtgctggtcggatcggctcgttggtcgctcgatctttccgcgccggccttggttgtgaagttcttgcgtgcgatatcgttcagaatcctgagctggtttccatcggcgtcaagtacgtgagcaaggaagagctacttcgacaagctgatgtcatttgtctacattgtcctttgacgccagacactcggcatctgcttaactcggatactcttcggatcaccaagccaggtgtcaccatagtcaataccggccgcggggcattgattgattttgtcgctctgcttgacggactggaaagtgggcatgtcgggggtgcagcgctggacgtttatgaatacgaaaagccgctgttcttccgcgatttatctgagcagatagtttcagaccacaccttccggcggctgatcaccctccccaatgttatcgttacaggtcatcaggcgttcttttcccgtcaagctcttgagtcgatcgccaacacaacgctttcaagcgttggtcaattcgaaaagaacggtcaagtggagaaaagcgtgacgctctgagttagttcagtgtgaacttgacgcggactagattcagccctgtcatttacttgtctatttacttcgtggatctttatgaactaaaagttgtttcataatatacaagatcaaatccaaaaaaatatcgtctacccagataaatgcctccagatgctctagcacagtttaaaagccataatacaacaaacaaatatggatcttaaacatttccagtcccatcaaactaataccaaaataccttggagaatgaagccgtagatctctcataggaggttgtacatcgaaaatcgccacatagctcactatccttggaacgtcttcggccgaatcagacgttttcggtgctgcatcacaccacgtgtagacgtcaaagaaactttataccaatgagcttcagcttggaactgcggttgacggcggtgctggagaggttcacttacatcggtggctagctatatccctcagccttaccacgtcatagacaactataagcggaagcacaatgtgtatagtcaggctcttaatcatgcgtgtcagagcatatgacatgtatgattcacgattgttctagatcgagataatagggagcctaccacgtcatagacaactataagcggaagcacaatgtgtatagtcaggctcttaatcatgcgtgtcagagcatatgacatgtatgattcacgattgttctagatcgagataatagggagcctaccacgtcatagacaactataagcggaagcacaatgtgtatagtcaggctcttaatcatgcgtgtcagagcatatgacatgtatgattcacgattgttctagatcgagataatagggagctctagaacattgtacttggcagcttgtgccgcgaaacagatttaaatactgtgccttgaacgcgggcacaattctattatcaagtcaatccatattatttttcaattattttctacaatatcacgaacctgttcaccataaatcaccatgactacagtcggaagctatctagccacccgactggctcagattggtatcgagaggcacttcgtagtgccgggtgactataacttgatcctgttggacaaactgcaacaggaacccagtctaaacgagatcaactgcacaaatgaattgaactgctccatggccgctgaaggctacgcacgagccaagggcgtcgctgcatgtgtcgtcacctacagcgtcggtgctttctcagctttcaacggcattgggagtgcctatggtgaaaacctccctgtcattctcatcagtggttcacccaacaccaatgattcaggtgacttcaacctacttcaccacacgctcgggactcatgactttgagtatcagttgcaaatggcgaaaaagatcacggtcgctgcggtttcaattcgtcgcgccttggatgcgccgaaactgatcgactttaccatccgcaaagcactccgtactaagaaacctgtatacatcgagattcctacaaatttgtccaaccaaccgtgtgcgcccccgggaccaccgtcggtcatcttggagcctctccatagtgaccctgccgttctgaaggaggctgttcacaagacagccacctttttgtcacaaaaaagtaagattacgatcttggttggtccaaaagtcaggtctgccaaagccgagggcgctctccgagactttgcggaagcattgggctgcgcggtggcagtgatgcctagtgccaagtcattctttccggagaatcatccccagttcgctggagtttactggggtctcgccagcacgctgggtgctgagtccatcgtggactggtccgacgtgatcgtctgcgttggaacagtctttaccgactatagcactgtcggctggacgagcgagccgaccgattccatacgcgtgacggccgacgttgaccaggttcagctcccgggagcagaatactctcgcgtctacttgaaagagtttctgtctggactgtcacatctggtgaagaaagacccggcaacaatgctggaatataaacggttgagcccagccgagccaagtctgactgccagtcatacgaatgaaaagctcacacgaaaggagatgtgtctgcagatccagaatatcgtcacctcgaagacaaccctctttgctgataccggcgatgcttggttcgatgctattaaaatgcggcttcccgaaggaaccagattggaggttgagatgcaatggggtcacattggatggtccatccccgcatcccttggctatgccgttgggcaccccgataggcaagtgatcacgctggtcggggatgggtcattccaaatgacagcgcaggaagtatcgcaactgaccagactgcgcattcccgttactatattcctcatcaacaacattggatacaccattgaggtcgagattcatgatgggatttacaacaacatcaagaactgggactatgccgcgttcgtagagtcgttcaatgcgaaagatgggcatggccgcggtttccgcgccaccactacaggagagcttcgtgcggctatcgaagcagcgaaaaagaaccgacacggaccgactctaattgagtgtgccatcgaccgtgacgactgcagcaaggagttgattagctggggccatttcgtggctgcagctaatggtcgtgctcccaaggcataggaatttttgatgcgttatttgtcataatttgtattcgtcattaatatggctgagtacacgaagtatactttcctaatctggcagaaaatgaatgttaccacgtcttgtcttctagagctactccgtatggcttccttccttggtaagtgtttctgctgcgctattccctttttagaaagtgacatcatggcggtgtggactcgacttgaacgcgaacctcgtaaaccaacccccttcttccgcattgcatcagaacctaccctgaaaatggaagagcaaattcgacagatccgtgggcatatcaagagtcagattccagacaccatcaacgacttcctcgaaacggttggaacaacaacaatacgaatacttggcgacactcgacattggagattagccgagttccatacgccgatttgcgtcaacggtcgagaattcggttcgtgtaagccagccgaacgctgaaacttgtttcctcgccgtgaacatatacccacagaagcactcttattcgtgctcttattcgtgctcgatgtcaacaatgtcgactatatctatgagactgcccacaatggcatgaccacaataccagtctatgatcttcgcttgtcgaagagtagaatcagcaattctcagagaaggaacgctagaggctaatattgctaatacctagcaataatgcacaatgggcacgggcatgacccttgcctttggttgacgattacaacgacgtttgtcctccgatacaaaacccccgcaaccttttgtctcgatgacttgaccaagatgctcctgacccagaggaaagagtattccagcactattcaagcactattcaagcttagtgggtcttctcgatatattcacatgggggtgttatgaggcaagatagtggtgctgtgtcacccgagatctgacctcgaagacagattctaggaagatttttatttaagaagcatcagcttggcgtgagaaaaagctttgcaaacctctttggtctggtatgatgacacttatgctttaaatcaatttccatcgcaaactgttctttgtggagaaatcgattatcaaagaagcactgagtacggtacagtaggtcgttgagtgcatttggtcttggtcgaaagcccaaagggtcaactcacgtgcagcagcaccagctataaatgacaatcaatctcctttcatctctctcccactactcactttctccatctaccaaacattattcccaaccacagctctgttctcagacagctcttactcaatccaccttcaagtttgctattatcgacatggctaaagagtcaaccacccctaaggccaaggcgaccaaaccggtcaagataggaggaattgcaaagcgaactccggtcaaagcctctcctgccaaagcctcccctgccaggatctcgctcgctatcattgataaggacgtgatcttcttgtggaaatgtatcaagactagcagcatgaaggcaagtgtctcagatatcttgatacgtctgattaaacacactatagcatgtcaatactgactaggttgtcttacagattgactggaatgctgtcgccaaagagacgggcaagtcgacttcaaccttgcagaagcagttctcgcgacttaaccagaagcttgagaagaatgttaaagttgccgcccccgatgcttcctccgacaaagatgccaatgaggatgttatggttggcgcatctaaagattctgactagatggatcgtgatttcggcggcaatgcagaggtgacgcgacgagggaagacaggctcggtataggagttttgtgttcgtggtcattttcctcgtgattttcactaccgcctcatttgcttttcttcaatttcttattctctttcttgggtcaacatgtgcccctcggtatttttacttgtgacggcagcatcttggcgaagatgactgtgacggtctgagagccttcttaatccaatgaactttataaatttattttaccctaaatttcatagagaacactagtaaatgttggctggtaaacaaggtcttaagacattcaaagtgacattgaagttgttgcagtataagagccatccaaggtacccatgaatcggacaatccatgtccaactacgtcctccgatgtccaagtatgtccaagtataagccctgacacgtccaacttgaacaatccagccataagatgacctcattcctgcatattcgtccgagcccctcacctgggcatttatttaccccgccccttccagctcaacaatctacatacttcccaccttaccccgaatcatctaatccatctaattcatcatgtccaacccctatttcgatatcgaatacacctcgcccaagggccagggtaagtacacccccctatctcatcccagcgacgctaacacgcgtactagtggagaattggggccgaattgagttcaaactttatgacgacgtcgtccccaagaccgcgaccaacttccgcgccctcgcgacaggcgaaaagggcttcggctatgcgggctctgctttccaccgcgtgattgccgggttcatggcgcagggtggtgactttactcgtggaaatgtcagtcacggtatctccagggaaatctgagctccagctaatcttcactttcttctcagggaacgggcggcaagtctatctacggcgagaagtttgcggatgagaacttccagaccaagcatactaagggtggattgctctccatggcaaatgcgggacctaataccaatggttctcagttcttcatcactgtaagttggaaatgaaattgatgggagatgtcttgttctgactggattagtttgtgaaaactcctcacttggatggtaagcacgttgtcttcggagaggttgtctctggtcaggatattctcgagaagatggagagcaagagcttggatcggtctggaaagactgatggtaccattaagattgctgcttcgggaacagtctaagctattatttggaatgtgctctcttctatctacacttactgggtagtaaggcggatgtgaactcgtccatcgtctcatcgatctatgcatgccatatttttttcaagacttccatcaagttagatagaatgaatactaaaattcccggcaaataccattgccaaaaccatgcaacatcagaaagaatcagtaataatactatacacacaagtataaatcacttcacagcaaccaaaaacaaccgcggatacttcaacaacaccctcccatcaaacgaaacgggataagcagcccgcaagcgcctcaaataatccgccaaaaacgcctcctcctccccatccaccaacggctccaaaaacggcctcaaccccgtccccttaacccactcaataatcgcctcatggctctccagcgaatgataataactcgtctcaaaaacatcaacccgactacaaaccggcttcagcagatcatacagctcctgcggcgactgaaacccatctctctgcaccccagccagtttctccttccacggaccctcagcagcagtctcacgcatgagcagatgcgacggctcgttcagattatgcggtacctggagcgcgaaaaccgcgccctcttgctgcggctgtagcagccgtttaatgaccgcgatgcggtcatccgctttcagccagtggaacaccgcgttcgagaaaaagaggtcgactggcgtggctgggtcgggcgtgtacgtggacaggtctgcgatttggaagtcatggtctgggaggactttctttgcgcgcttgatcatgtccggtgatgagtctagccctgttattgttgctgatgggtattgggttgctagtactgttgttgagttgcctgggccgcagcctaggtcgattattctccttggggctgttaggggcacgtgcgataggagatcgcgggcgggctgggtgcgctcgttttcgaatttgaggtattggtttgcgctccagtctttggtttgttgggtcattgttgtggtgaagtgtctgtagactggtcttgggattgggattcttgtagagtgggtgagtaatctcgttgctgtgggattaaggcgacaaggcattgttttgatggtgttaaatactagaagatgtttggctgtatgggcaatatttgtctttatattgatatctcgtgtttaatggggtgaatcaggaagtggcaatgtcggatgttcggtgatcgctccgatatcgctatgaacagcgttgcattaaaatccagaacgatgaaggaagctggtaaatccgacatccaattaccgatatatctagctactagctaacatatgaggtacagatagataagatgaacatgatgtgcgacactacgctgcccgctttttagtggaccgaggttcgcgccttccgcatttaattacccaccaagttgcccaacaaggactcaatccaggataggacatctgcagcactaccagtggggatagatacggccgaggtagtagcggaggcatcagcgctggtagtagggacttgcgccgcagcagaagtagtcgattgacggacagtggtggcgaaagtagtaggctgggccgcaaccgtggtggtggaagtagtaggctgagcagcaactgtgatggagggcgttgtagactgaacagcggccgtggtaggggtttcaacaacagcagcagttggggtggtagtggcggcaaccaccgtagagctggaggtcgacgagatcgacgaggttgatgaggtggacgaggtggacgcaaccgccgagctaccagatccaccgagagtgaagtcgatacacgactcgtaggtctggtcgattgattctgcgtaccagtaccactgcaacacacagtcaccggcggtggcacactggcttccaagatcgtcggggatagtgacgctgaagctggtctcgttggcagtgacgccggtggctacggacgcatagacatcccaggagattaggggactgccaatgacagtgttggaagaagtctggacgacagagacattggccacaccggtgtgcggggcgcgaatatcaacagtgaaggcgacttcctctcctgccgtgtacgactggatgttggcctggttgtcggcgaacttgtagcccttgcacagccagatgtcacactcggcggcgttgtagtcggtctgggtggcggcaacttgtagctcgccttggatgttgccgtacttgtcggactcctggttggacagaacttgctgaccacacgcggctcccattgcagtaccgggctcgcgggctgccgggctggtgacgaagccatgggcgttgaccaaggagatgatactggcgaaagccagggcgggggtgaaagacttcatgtttagtgaattgggatgtcgggaagtgaatgaaaataatcggtaaaccggaccgatgaatgaatgtatacttgatgaacgagagtctgcacggtctcaaaccggagaaaatgaatgtgaatgtgaatggaattcaaaaaagactgaccagcatgctgaactggtcttgccacgctgctatgtcgcttcttatatagtggacatattcaaaaggaggtctacctgagctgcgacattaatcaactagaaacagtagcttaccacttaccagaggcatcatgaacagcgattaggcctggatccatgatgtatcatactgaaacacatcggatatactcaagggacagcgctcccccaccggaagggactggtcagactggcggcaagcacagggcaatatggcctcgggttcgggtgtatattgaacccgactggatgatcatctagagacgagatgttcctcaggctagggtttccaagcctggctccacgcgccgaacagggatgcgccgggtttcacgttgatggagacctcagggctgccaatggcgggtggtgacaggtgagacatggagttttatggatgcttgaagttgattaaagacgtggagatggaagaataaacatgacttggcagttctcttcggacgattttccaattccattccagaattctcccgggtagtccacttggtgctttggaaatcgaactagatccgatgaaactaaataggaagttcatgagctgtcaaggatttcacagtcaaagatcatctgatatttgctgcccaagcctttagcattggacattctcgcatatgcaataccttgtacgcaatgcctccgagtgattagcctcagctaatcccttacaggagacggagtattgtgaagtttgaagttattagcgtcggcttgccgaaattccaccaatcatgacaccggagtattttatagagctgattggcattttcccctacctaagtggctcttggatactggtctcttactctgtgcgatatgcttcaatggaaaatgatagacaatcaaacaacattcactatatactcccaccacccgtgaccgagccatccttcctcgtgtcttgtgtatggcaacagtgctgaagaaacatcagtccacctcagcttctagcgattcaatgaaagatcaaagacaatcttgcccttcgcatgcccctcatccattctcttgaatgcctcttcatactgctcaaaaggccagacgctatccaccaatccccgacacagccccttctcaagcaacttcgaaacctcctctaactgtctcctcacaggctgcatgataaagaacacatctttcacaccttcacctttaaaaccctctggacagacctgcagaggtggctgatagatactcagcacaacaccatcatccttaacagtccaccacgcatcctgaagagccttccccccgatacaatcaacaacaacatccaccttattagaaggtaactgcgtagcccactccttcacatccacaacttgataatcaagcacctccttcgcaccaagagacttcacaaattccacattccgagggccacatgtcccaaccacctccgcaccaagtagcgtggccaactgcacgagccaaatgcccacaccaccagaagcagcagtgacaagaattctctttccagaccaggcaactttagcagcctcaaaactcatctctccctcatttgcaccggtaccaagagcatgaacaaaaagaatctgccaagccgtctgcgcagagacaggaactgcagcagcctggacccagcttaggcccgtaggcttatgagccagctcatccgtaacggcgatggaatactcgcgcgcatttcctggccggctatagtttgtgcgtgcgtacacttcatcaccgggctggaagggcgagtcgtccggtcctgagatgacgattcccgccatgtctggacatgggattagagtgcgctctgttggtggagggaagttctttggccagaggagctcgccggcgcaagggctgcaggcttttatttggatgaggtgctctccctgtgcgtggtttggagttgggaggggtgtatttgttatggtgagggttttagaggcggcggttttttggatgatgctgaacattttggagggaagggagtctgacatgtttggaattcgaaacgttgttattcaatgaggaatgtgctggtggtgtttcgttcttgggctatatagttcaaatgttgaggcgtcatccggccggatatcccgcataggctaattgatagcctatcttggtacttggagagtatatcctaatgttgcactaaattggaactcaactaacctaaattcccgtatttctcgtatcggaaactatagctacgaatcataaatgcccgtcatattccctctcttcgacaaaattgtaaaatactacaatataggggggagatggaagatagacaacatcaactatagagcggtagatatccttttgacgattttagtgaatatgtgtgatattattcccgtttgagacaacgaggtgggctcactaggccaagcggaattctcagcaggatttccgtgaagaatacacactttacattgactcttcctattggtagacaagagtacttttgcaattccgcatgcgagtacccaggcgacatccaatccgagggctcatatcagtcggaagagatttccaccccacaatgccacacatcccagcccacagttcaagcctatggcagcggaggtttcgacgattgcattgcctaatctggcctgtgacatgcacgagcgggatgccatgtgctcctgccatgtggtccaatgcttttcgatccagtagctccgtcgagcaggttccggattctcgctctcgactttgatcgtctactctgctttttctctgaaaacactctacaatggatagaatacatactgagcccgaggatgatatcgccgtggtatgtatactgcttatctctttgatttatgtttctgacaatgttaggatcccacgacccatatcacgaccgtttacggcgatgactggcaatcgtgagtcttatctctgtgcctatatggagatctctcacacaatccagggaaaccacttcgatcggctcctcgctttatcgcgggttagaggagaatggccggcgatatcaaacattgagcaacaaggaatatctgtacgcattggcttccgaatcgaggtattgcctgcttacttcctgccaggattccatcggatgagaagcagttcgattgttacgaagctgggtatgtggaattctcttacatatggtctttgttcaaatggtaactgattattgcagccacttggtagccctcgtcatggactcagaccaagagaacccgctcttccggtcgcctgttaaagaccccaaaaacatcctcgaccttggaacaggtctgggtaactgggccatgtatgtggacctttcattttcataaaggatcactactcaccctcttctagcgatgtagccgacatgttcccaacaagtaagtccggagccccggtccaattcaccatatcaacatactaaccaaaaccccagccactgtccgcggagtcgacctcttcccaccaccagtaacatggatgccaccaaactgcatcctagaagtcgacaacatcgccgaagaatggacctggaacgaacctcaagacctaattcacatgcgcatcatgatcggatccttcagcgacgcagaatggaaacgcgtctacaagcaatgctacgagtaagcgcactttcatccccatccccagctcccataactaacccgaccccaccagcaacatcaccccaggcggctggatcgagcaactagaagcaagcccctacatcgaatgcgacgacgacagcctaccagcagacagcgtcctccgcagctggggcccatcgctatccgcatgcggcaagcgggccggtcgcccgctagaaacaatcgatacaatgcaagacgctctccgcgagactgggttcgtggatatccgtcagaaagaatacaagtggcccattggcccctgggcccgagaccagaaatacaaagaggctggcacggtcaactaccagcattggatgtccggtatggagggctgggctatgtggttgctgtgtaaattcggggcgccgcagccttggtcgcaggaggaggttattgtttatgttgcgaagctgagggcggagcttaagaatcctcgctatcatatttatcagcgcgcgtatgttttcccttccttgcttcttgtgggtgtgggctgatatttatacaggcgacgtgtgtgggcgaggaagcctttacctgagcagggagctcaggcggagactagtgagagtgttactatcaagactgagcagtgagaggatatttcgttgttggggtaagtgaactaggttgtaggatgacatgtctgatatggcgagttgattggaatggctggacgcagccagccttggattggcgtcttgtgctttttggactctttgtaggtgctgtctatgacttcctaccaatgcattcgatcttttgcacatatatatgatagagggacaatgccctgcacaacactagaggacggagggtaagactcgcatgtatttacctcaaaggtgtgtacctagagtatgaaacgacggcgcacgctcctcttctgtgggtcaaacatactgctgaaggtgttcgcagtaaaagctaatgaatatgtgtagtaacaatgtgcgaggtatcatgggtaaagagggaaagagaactgaaagagaaaaaaaaaaccaaaggctatgcgcttgtaaaaatagacaaaaccacaaccagagttgagcgtaacaaaaagaaaaagactgggcgatgacaaaagagagagagagagacgtgctaccggcgatcactctggacctgcgaatcaaaatgcacacgattcctctcctccgattcattcgtggcatagtcatccgcgaatgggttccgcacctggaaatcctcaggcttgtattcatatcggctattagtcgtagatcccccgacaggattggaattgagtgaatgggaagcaagtggccgaccaccagtcatagtcggagaaggcagctgtgccggggattcggagctgcgcgttgaaatgccagctggcgccacggggggaggagagaaattcgtaactcctggcgcgacaacctgcgacgtcggtgaagggctattcaaattggacgagctgggcgacgaagatcctctgatcttgcgcgccttcagcatggcacgctgctgttgcgacagcgccacggagatctcttcgtttgtctcaataagcgtcaacaaggtgtcctcgtccggagccgggttggtcgcgtggatatatccttgaacaacacgcgaaccggttgtgcagcggtcaacaaactccttgatgagatcgttgttttccagctctatcggcggcgtggactggacgaattgcgtgagcagcttggccgaattgcgcgcctcctcgatgcgggctgctagttccaccggcgtggggagggtatttgtcggcgcgcgggacaggccgtatggctgttggtgagggcgagacctaggcgggactcgcggtgggacgacggaattccttgggaaacggtcgatctggctaggttagtcttggacggcgggcacgcaaggtgactatgatgtactcaccagaccgtgagaggctttcgtcttctccttcgcccacatctgaagcagcagtttgagatcttcgtcccatgcgcgttcttgctcgaggctatccagatactggcggagatagctctgcacgttccagtcgcgtcctgtccgcagcagctccttaacggttgtcacgaatttggcatcgaagttgcgtgtgaaggtgtgccccgggttgtcggccaggatgcgcatgagcatgatcgcattgtactgggtgtggttcggggtaccggcggggtcggtgagatacttgcgaatgcgcaaagccgcttccttagcggcattggggctcgactcggcagtttcgacgatttgagggaggtaaacgaattcagttccttgctggagtgtgcgaatcggttgtcagtctcgaaaagggggtgtgttatcatctccgaggcacgtaccgcgtcgtgcgaagatccatccgcattcacattctgattcgattcgcagaaggcagtctggagatgtcagtgtgccttgttcaatctctcgagactaagcacaaaccaatgcttgcaggacaacggcttctggtgagtcttcgctgtattcgacactgtcgctggagcctattttcaggtacaaatcagtaatttgcggggagacgtggagaggagacactcacttgagcgcctgctcagagatcccaggaagcgcttcatggtgatcgcacagtcgcttgtttttggggagggtttttgaaagggaagaaagggatcaaattgctaaagaataatcctagtaggggcccaactgcttcgaactagtatggaactagcaataggtgccctcgctagttgatcaataaaaccgagcagtgagatatatataagtcaatgtccccagcgatcaacgctaccttccacgcacgcatccagataatctgcattgccaagctgagtgccatcaggctccaggcaattaatctcacctgcccagggatccatgatgttttgaccctggtgactcagccacgaacgaaggtaggtagacggtacattgtttcgatacgcattggccatatctttagaagtaccaagtacttagtatcgtatctactctgcttcaacagcatctgccatctcccccagtgtcttaaaccgccaatcaaagatcggatccgccgaattccccatcaaagccccaggccgctcaatccaaaccgacttaatgccgaccttcctcgcaggttgatgatcatggaactggctctgcgccgtctgcagaacctgtccaggctcaaccccaaactcacgctgcacagcactcaacataaactcaaagttccgtggatccggcttgtaactgccaatatcctgcgcggtaaggatcatatcaaacggtacaccctgcaagctgccggcattggacttggcgaatgaagcccggtccacgttcgacagcaccgccagcttgtagtgctttgacagtcggcggagggcgtcgacggtgtctgggaaggccggccaggttccgacggagttgccgaattggcgactttcctcgtccgttggcgggttgaggcctaggcgcgcggcgagggtggggtggattgctgctagcaggtctgagtatggaaggtccggggttgcggtttgttgggtgctctcaagctggtggtaggttgttagaaggtgttcacgggtgaattgggtgctgcttttcgagaggattggtgccaatgcatcgatgatgccgctttcccagtcgattagagtgccgtagacgtcgaagcagaggaggcggtagtctgataggctggtcattttgggttgatcgtgatatatatagggagatggagtagattggatgagggaatctcgaagtgtattctgtttggactacagagtacttatacccccgcatttagatccctgcttatagattaaggaccttggcatgttcctttcccagataaggattgccggggactgaaagtggtataggtaggatttcctcaagattccatatctaccaataaaatccttcaagtgcatatagaggtgaacccgtaattccaaacaccgagatatccactcatcgttacgatagatcaatagatcagataatgcatataaaacagaaaaaataagatcacattatatgaccgaaagatcgaaacctcgacagaggtgtgcagctaaacaagacagaaatggaacactctctatcaaagaaaaatcactcgatagagtcacggagaaagaaccacgtttgtatcatgattggatcgggaagtacagaatcctatttccatcatcctgggccatatcgtttaaactttttattgggttctcctccgagtgttggcatgaccttaaaatcttgtatgatccggtatcgagtccgttccaacatacacagctgatgcacagaactccgatccttcccgtccaccgcaaaaatcttttcacattgcgtaaccacacgtcccctcacaccttcttatggcgatccgtttatgcctcgatgagagcacggcggatctgggtgccacgctggcgggaagagaggcggacctgcttgtcggtgctggccttcttgacctcctcggcagcctcggtgaggatgagctcgatgtggcaggggttggtcatgtaggggttgatctggaaagaaaaggtcagcatttggataccgactcaaccgtacatattaataaaacgtacacgaccgtgagcacggtaagtgcggcggcgacccttgggagcctggttgacctggatgcgcttgatgatcagagcgctggtgtcgagacccttgccatcggcgttggcctcggcgttcttgagcagatcgatgatgtgctcagcggacttcacgggccagcgggccttggagacaccgaactgctttcctgtaaaccgaaaattgtcagtcgatgttcgactccattcacaaattttcatccagattgtagaatgcacagcatcgccaataagccaagaaatccatcctcgtaatccattcatattttcctcgtcatttcaattcatatcccagtggctgtcgtatattggcgatgctattcgtcctccccacaatccgaaactccaatccatccggaaatttcttcaaaagggcgactcaccctgagcagtgcgaccggtggagccagcgtagcggcgcatgggaacggccatggtcttcttggtaacgttctcgaggaaagtgagggccttggacagcttcatgccgttgacggcctgggcagtctcacgggtgttcttgaagctgacacggaggtaagagccgcgcgcgcgggcgctcttggcctccgagatctcctgtgcggcgtaacggacctgtgaaaagcatcgctcgttagcaatgggatcgtcgttgggtgttggtgatgtagcgaaagtcgacccggcgatcggacattgaatgtgcatcacacaagtggcatttcgtagagaatgggattgcgaaaggtcattatcgatgacagggacatgcagcactcaccatcttgaaggagttggcgaggggggtgtgatggtcctcggtgatgagttgttgtcgcttttcgtcgtcgtccggctctcgcttgagccactagatttggtgcggtttttttcgctcttggcgctctggccctaagcgagccctaacgctagccgttttgggtggattacttttgagttatgtcagagcttagtcattgatttctgccccacatctcagccttgaggttcactggtgcaatcaactaaggtgaacatcttaagttgcaactatacttcataaactgatcattgatgattgaacggaaaaattttattcttcataaatccatatctatataccctattttgtctatttcttctgctctggaacctgtgtaataagctcacccttctcaacagccgaccgcatgttatccagcaccagaatctccatatccttctgagtctcataagtgccagtaccaatgtgcggcagcaacataacattaggattgctaacgagcccgggctcaatttccggctcgcactcatacacatccaggccagcagagcgcacctatagaacagccaccagtcagccgcatatccatcatggaagttgaagttcaacgcagcaaatacataccttgccagagtcaagtgccgcaaccaacgccttctcatcaattagcgcaccacgggccgtgttaacaatcacgacgccatccttcatcttggtgaactcattagcaccaatgatgtggcgcgtggatgcgttcaaggccaagttcaagctgagcacgtccgaattggcgagcaactcgtcgaatgagacgtatgtcgcgccggcttccagctcgggtgatagacgggaccggttgtggtactggatcttcatcccgaaggccttggcgcgaattgccatttcctgctcatggttagctgtggtcaggtggtatattactgtctgtgctacatacccgtccgatgcctcccatgcccagaattccgaggaccttgtccttggggtcgtggcccagggtagtgctgtactgctttcctcctgcggtgatcgggccttgccactttcctgttggaggaattatggttagtcaccgaatactgggaaagaatatcattccgctctggttagccacttaccttcccggagagcagtaataggcacgtaagcctggcgcagagcgccgatcatcaggaaaatgccaacgtcggctgtcgcgttgttgaccgcaactggggtgctggacactgcgatgttcttctccgtgcaggcggcaacatcgatgttgtcatatcctgcgccgttgtgacagacgtacttgagagatttaggcaggactgcgagcaactctgcgttgaacggaccggtgtactatgcgttgtcagtcggatcactcgaagtgaaaggtcaggccggtatctaccttggtggagctgttggaccggtagaggacgactacatcgtcatacttgccagccttgcagtttgcgatgaactcttctctggttccgctggggaattcctagttgtctattgagcaagattcggtcgcggcgcaatacgaatcacttaccttcaacgtcaagaatgatgagaggctctcccattccttgcgcgcgtgtgtgatttctccaatgaggagagctgattgtgttgccatgttgctggtaacgttagatgcgccaaatgatgtcagcggggttgctcacatttgtaaaagttctatagggatgtatcaagaaaggattgagggattgaagcgagcaatgagaagattagcaactgagaatgaaaagaaagaagaatttccaagattccagaaatcaagagatcattggaggttcaaatgtccccgctatcgcataacccccatgtcgtaacgggggctcctccgacagtgtcgtggatatagatgtacgggttttatagatcgtattcatacttatacctcaacctagaacttttctactcaatttctacatttatctgtttatacaacgattatcattaacttcatctcttcacttattactccttgatcttctaccaagtgcaaattcaagaatcatcacccccacgtcggctatccaaatctcccctttggtgcaataaccgacagcggagcacctccgggcccaagactttccccccacgacgaccaagtggggtgttttggatgtgtagaggggcaccaacgggccgagttgactccaaatgccgtcagaggtcgggtttcgctacttcttcgctatttacttcaatcctttcttttattctctctgaaactattacctactactctctacacgatatacacactatggcaagcacaaccaccaccgcgctcgttctccacggcgccaaagacctccgcctagtaagtaactccaaataataaccaactcggaccaaactaacccaaacccaggaacaacgcgccatcacccccccatctacaaacgaagtccaagtcgccatccgcgcaacaggaatctgcggctcagacctccactactacagccacggacgcaatggcgacttcgtcgtgcgggcaccaatgtgtctaggccacgaatccgccggcacagtaacagccatcggcagcgccgtgacaaccctgaaagtcggcgaccgcgtcgctctggaagtcggcctcccatgccgcaaatgcgcgctctgcaaacaaggccgctacaacatctgcaaagccatgcaattccgcagctcagcaaaagccttcccccacctcgacggcacgctgatggagcgcacaaaccacccagcagacatgtgccacctgctcccagacagcgtgagcgacgcaggtggtgcgctcgtcgagccgctcgccgtcacgctgcacgctgtgcgtcgctcacacccgccgagcaaggcggaggttgagcagaaccgctccgctggagaggagaccccggcgctggttttcggtgctggcgctatcggcctgctgcttgctggcgcgctggcggctagtgagaatttctccgcgattgtcgttgcggatatcgatgcgcggagactcaagatcgcggaggatatggggcttggtcttaagacggcgcttattcccaggtctgagactccgcctccgccgaaggatgcgccgcatgctgagcagacagcttatgcgctggagaatgcgcaggtggttgccgctgcgttgattaaagccgtcggtgcgaaggatggactcattgtgaacggattcagtcgtgtttatgactgtactggtgtgccggcttgcgtgcaggcggggatttatgctagtgcgcctggtggtgtgctggtgcagattggtatgggaaatcctatccagacgctgcctgttggtgcggccgcgctgcgcgaggtcgatatcattggtgtgttccgttatgatggatctgcgtaccccgctgctattgcgctgctggcgagtggaaagatgcagagtgttcaggagaaggtcgttacccatagactcaagttggaggagggggagcgggcgtttacacttgccgggaagggagttgatgaggaggggaaccctgttgtaaaggttattattgagagccgacggggctctaatggctctctgtaaatttgctgatgaggacgacggcgatgatgatgattgtgtttgaaaatacccgaattgtgacaatagcaaaaagatggatatatatgtggagaggattatgaacaaaattgcatatacaaagttgaggtgatgatcgtgataacttgtagggcgctaaggccatgagatagatttccacttcttatactattcttcataatattgggttgctcatttcaaccctccagccagcaaaagactctgacccgtcatgtagcctgttttcacaagcatagtcacaacattggccgtttcctcgggagtcccgaggcgaccaagcggaatcccagctgccacctcagggatagccgcagcgttaggaatcataccagtgtcaccaatcatggcaggcgccacatcgttaacactgatattgaattcagccagtcgggtagaaaggttcttcatcatgcctgtcagaccacctttagaggcagcgtaatctaaaagagagtcagtttggtattcctcagagaaggaaagaagctatacatacgacatccattgattccaccaccttgcgcagcaatcgaggacataaacacaatacgcccccaattctggctcttcatatgctccaccacccccttgacgagaatgaatgaagcgcgcaagttgacatgtatagtatgatcgaactcttcgagagagcagtcccagatttggggaatccgcttcccgtgcccagcgttcgagatcaggatatcaggtcggtggccgtgctcggtgtcgatttgctggaacatcgtctcgatgtcgtcagcggaacctacgtccactttatgaattgagatatggagctttttatctgcgtatttgctctgcaggtcggtcaccagtgcgttcatggcggtcaggttgctcgcgtatgtcagggcgagatgcactccatgttgagcaagctggtgtgcacaggcagatccaattctatagaattaattgtcagttcttcattcgccgtattggggtgatatgagttggaatagcttaccctcccgatgcgccggtaatgagcgcaagccgaccctggatctcgttaagtgacatgatgcgacggagttgatacgtatgttgacgatatgcaatgatcaagcgcagatgtaaactcttaaacctccaagtttgatctggcaaagaactgcgttgctggcctcggttacccctcggcgccatctccgagggtaaacccccgcaaagccccgcatcatttgccgtcagatttgggggtgggggtgtcacatcataagtaccacacggataaagccattaccaagcatttaaaagagaaggttgctgctcatatctcccatccaagcagacggctgccaagtctgcgagcgtggctctccagattggtacatatcggaggcattctggaacgcatccagccccaacaagccaccagaaatctggtccccggatacataatcgcccacggcctccaaatctagccatgagaagtcattcgcagggctgaatttcatgtatcccgggtctgtgactgggttcggaagggatgtttgtagtgggaagtcactattttgcgtctcttcggttgggttcgatgtggacttgggcttccatagaagctctagaaggcgagcatagcgcgacccgatgtcatcagtgccggcacttgcttgtttgagcacttcagtggttcggatgactaggccttggacttttgcttcttctgatgggaccatcattccgaatgaacgagcctatgatatcgcttagatgatatccagaagagggattgaataggaatcttaccttgtagaggaaaacggcagagtagatgccatatctaaatcgcatgagctgtttgcctcgaaataacacgcgacgaaagaaaaacttacaggtagaagcggagaggcatgaagtggagatgcttctcaggatctaccagatccaccaagattgtcaagtatgacttggccgcatcaacggattcatagatgaaccgcgaatcctgcatcgaagctacattcttgaatgtcgatcgtagatgttctcgctggttttgtaggtcggttttcggtttgacgagcgactgcgagatcgcagcttggaacgcgaaagcagttgtatacagacgcaaatactcgtatgacaactgcagtgttgctcgcataggtggtgagcctagatatgttagaaccaacatacccagcagctcaaataatcgagaaaaggccaacttacagtccaatgacccccaaagtgacttccaccgcagaatcgccagacggaagtcatccacatatttaacatagtctcccatcagcatcatctggttactagtacgcatccccgaatataaaacttcgtgaacattcccatagagctgcgtaagatccaacatagcctgaaagatcttcgcatagtcctcctcgccctcgttaaccggctgcagcgatggaaaatcctgactgacaagaccagtcatgggcccggggccacgagaccagaaagcacgtccaatacgcacagaaatcaatcgatcagagacatagcagctcgcccaggccagacgtctccgtgcctcactctcatggtccccataaggatccccacggaaagacgtgcgatccatgccgatgaaataccccgagcgcaacgcaagcccgacatgcatccacgccgcgcggtcttcctctccgcgcccaacgcgttcaatgcgaggccgcagtccctgaggttcccactcggcgagtaagagaagcgcttcgaccgcttcaacatcacattctgcgccagcggcgatgccggaaatcagctcgtgcatgtacttcgagcagtactcgtggatctcgggttggtcgaccaaatccttggaggcgatcgtcaggactgcggtgagcaggtgcttctcattggcggcgaatgcgtctagcgatgcgcgtgtgaaatacttccgcggcacaaggggaagatactggtggaagttctccgcgtagcgggaaatcagttgccacaccgtttccgggtctagggcgcacgactggacaagtctgtaggccctgatgccagtggttgggttgttgaagtctgagacgccattgcgcaggctgttgtatactgggaatggtgttggctccgaccgaacatgttcattgcggatctcgggagcgatctctgtgccttccgtggcgatgccggtcaagcattgccatgcgtctgatggattgcgcgggacagacgatatcgaggtatcatcttcctcgacggatgccgatgctggcgccggtggattaggtggcaaaaagactagcgggccaggataggatgccgattgcactcgacgattttccgagttggttgggcttgagacttccgaatccttgcctggtgagcgattgaccggtgtaaagttcttgattttgttcttccggattcgacgacctccacgatttgagccgcctaatatgcactcgcggttttcgcgtacacaacgctggcatggtggtttgccgggtttcccattagagtctctgcatgcgatcagcgcggaaccatctatattgcagatgcggggaaagactgcaaggatcgtggccgaaacgagaagaaaagacaatcttacaggtcacatcgagacttgcgttgtctgcaatgcaaacaggctcgcgaaacgcgtttggcgatatcgcgccgtgaggcttctgacggggattcttcttccatggctacaggaacattgaagagtacgaaatcaaagtcggacgtccccacaaagaattccgaagacccttactcatcgccatgctcctctccatgtgggggatgcgggaccttgtggttaaacgttttacctacttttgcctctatggtcattctctaagaacttgatattaactgctttgaatgttagatactatatcagacattgtttctcttcatatgcttatttaatagccccttcatctgttcaagtagggaaaaccacttaccgtgtcaatagccgacggctaatgctctcggctattggtattgcccggagtaaccccgcgttctcggtttggtctgattgggtttcttatttggagctcctcccatttgcttctttgcttctttggttcttttattttggatttgattccttttcatattcatattcacattcacaatggcagacgtgatgtccctattctccctaagcgggaaaaccgccctcgtcactggtggaactcgaggtattggccaagctatggcctttgccttggctgaagccggcgccgatgttatcttggttcaggtgagttatttacacgcaaatattggagagcacatgctaatatactaatagagagacaccagcaacacagcaaccaaagatgagatcattaatcgcatcggccgtaaggcatggatccatgtcgccgagctcggggatcggaaagccgtcaaagcaatcatccccgcattgcttagccaaggactgaagccggagattttggtgaactgtgcagggatccaacggcgacacccggccgaaaagttcccggacgaggactgggacgaggtgagtcgataaagcaatataaattgcccccttgaaacactatatctaattcgtggaataatgtataggtcttggaaatcaacctgtcctccgtgttcatcatgtgccgagaatttgccgcatacctcctggctcgcgacgcctctgaattcccacagggtcgccgaggctccatcattaatgtcggctctctgctcaccttccagggtggaattacagtccccgcctatgcggcatccaagggtggcattgggcagttgaccaaagctctatcgaatgactgggtcgccaagggaatcaatgtcaacgccatcgcgcccggttatattgccaccgatatgaacaccgcccttatcaacgatgcggaccgcaacgccggtatcatggcccgtattcctgctggccgatggggaaaccccgaggatttcaagggtgccgtggtgtatctggctagtcgggctagcagctatgtttctggagagatcctcacagttgacggtggatggatgggacggtaaatgtttggaaatgaatataacgtacattacttcgataaattgcacatataaatgaattcttttggcttgtcaggtgtcatgagactattgccagactagttaactatcgggttattgcctgtaagagggaagaggtaacagtggcccgtgcgtccacttgaaacctcgacaacgccaatgtcttacagtcaaaccacctcagccctggagagacgaatggcacatgtcggcttgtgaaagtggcataattaataatgtctcagacttcatacactatcgtccaaggcgtcacgcccagactcgaactaggatcaacaaggatcgtcagcaaatcatcagcaaatcacacctatctcagggggccgctaaggcttgttagaaacaccggcgtctttagtgtcaccaaggagctatcccgataggtttttcggcaatttaaacgcctcgaacagctgcaaatcagaccatataggggctttgcggaagatatgtccatcggggtccatgcttcttctcaaaactctttcagggaggcttcttccacttccatttcttccattattcgcactcttttgtcttagaagacaatcggctggtctcgattgttaaatacactctctttactatattgtctggtctggactgcctctatattgtccaatttcattcttaaaaaggaaaaaggtgccccttgcctgcatgccagatacctgaaagtgaatctccaacgtcgattcttggtgacgtgccagtttctcacaaattccaaaagagcagggctgttttggctcgctttgttgacttcaacctggtcattcactttgagacaaacctcattgttcattgtcaaccccaaacagaaccagccacaatgctcgcgttataagacattgtctttgtcggaaacaatcaaagaggtctccatctatatcgacgcactttctccaaccctgtttataatccatttcatctgatctatccaccgtattcgacttcgattccccgcaaacgcccacatccaacatctcaatctttacattttgatctcggctgttgagcagctgcttgaaacatacacatacacattgctatatcgactaggcggttgtgcaacatcgacagcacagccttgcatgtttgctgcccagaccgcaacttctttctctcttcgatatctgcgcctgttcaatggcagcaacccatccgcatatcgcggcacgagggtacgggtcaaacgccacatacatatatgagtactcaagggggctgggtggcgtggacgtccctcgcgatgtgatctttacccggatcatctacggttccctgtgtgtcgtggcattcgcactgttctgtggccgagtcgcccagatcagccacgcatatctccgccaaatcaccgcaactagcgcaagcaaacaccagcagaccttctgggcccaggaacaatcaacatggtggtcaaacatcaagaaatacatcctatacgccccattaggaagcaagagacacaatcgagagttacagctttcttccgctgtcaatgtcggcactttaccctcccggctgcagactatcttggtcgcactctacttcgccagccaagtcgcatactgcttcatcctggactatagcgtcaaccacaaggcggccttggtcgccgaactgcgcggccgatccgggacgctggccgtcctcaacatgatcccgctcttcctcctcgccggccgaaacaaccccttgatcccactcctccacatcagctttgacacatataacctcctccaccgctggctgggccgcatcgttgtcattgaatcagtcgcacacacagccgcatgggccgtcaacgccgttgacgaggaagacttcacccgtatgctcgctcgcgtacgtgaaacccccttcttcctctggggcctcatcggcacagtcgcaatggtcttcctctgcctgcactccccctcacccatccgccacgccttctatgagaccttcctacacctgcaccaactcgccgcagtgttcgccttcctaggcgtgtacctgcacctgcagatagacaacctcccgcagcaaagctgggcgaaagcgatagccggaatctggataggcgaccgactcgcgcgcctcttccgcctcatccacctcaacatctcaacctccggcacaacaaaaatggtcgtgcaagccctcccaggcgaagcctgccgcgtgaccttccacctcccaaaagtcgtgaacatcgacccaggctgccacgtcttcgcctacatccccaggatctcctggtggatgtcgcacccattctcaatcgcatgggccgaaccaagcacaagcagcacatcgacattctccccctccccaacacaagacaagcgatacaatgacgttgagaagcaatccgacctccccaccaagccctccaaacccagcacgcaagtctccctcatagtcggcgcccaaaagggcatgacccgccgcctctacaacctcgccaacgcagccccctccaaaaccctcactctcgccggcttcatcgaaggcccctacggctcaaacccagcaaacttctccagctacggcacagcagtgctcttcagcgccggcgccggaataacccaccacctgctgcagacccgcgcgctcgtcactgccgccgcgcagaacaccgccgcaacccgcaaagtctacctgatctggtcggttcgatcgacagaccacctcacctgggtgagcaactacatggaccagatcctgcgcctgccgaaccgccgcgatattctcgttgtgaagcttttcgtctcgaagccgcgacgcgccgctgatatcgtcagtccgtccgctacggtgcttatgcattctgggaggtgtaggccggatgtggttcttgatgagattttgcccgggcggaccggcgccacgattgttagtgtttgtggaccgggcgcttttgcggatgaggttcgctcggcggcgagggagaggattgggaagggggctgtggttgattttgcggaggaggcttttacgtggtgaggtttgctttgttggtttatatgctttttgttcttttgccttgtcttttttttatccccgtggggtttcttgtaattttttttggtttaatgcactcttttacttcttttgtgctgcggttggcgactcatataacaaacattgcttaatgtctaactgtatactatcactatcataatctccggacttttcctggttacatatgaagatatcttgttgagaacgaggtctactgtgcaagagatagtaattgggaatgtagtagacaatgtaattgaacaagaggctctatgctagtgtatgtattatctcgggcatccctatctgcaagaccaagtgtaatatgtaagaaaaataatgtgcaacaagaagagcggaggattagagatggcggtctaatgcagagtatcttttaggagaaacagtagccatcggaagcccgttaagtgtcaagaagagaagaagagaaaagaaaagaacccaagagatgataaaagatcaagcagtcttagtcttcttgctgcgggttcccttgggcacacgagcaagccagtagataccaacagcagcaaatatgttgaagatgatgtacgcccacatgatgccgaagttgcgccatgcgtcgctgtagtaactcagcacgcccttgaggaaagtatcggtcttgtcgacgctgcagaaactgcaatcgctagtggcattcgcgttctggaggtagccaccagcaacttccatgtaggcgctcatgtattggtaacaggtatcgccggcaaggggctcgaagtggagcatctcgacgggctcgcagacgacgtttgtgccggatgtgccggtcgacagcattgcggagacgaggtaggtgaatggtgagaggcggtacatgaagatccagaagcggggcatttggtccggggtcgcgaggacaccacagaagatcagacagagggagaatagcaagttggcgatattgccacctgtttcggctagctcgataccagcaatcatcatgtgggcgaaggtgcaggtgaagatcatgaaggtcaagacgagaagccacatcagtgcgccgcgctcgtggagatcatcggcgctggtgttgcgttgcagtccaatggggtagtaccagcagacgaagatgaggaccgacatgagggcgttccaggggagttcgacaatgatgtttgcggacataaaggcttgccaggagtatgatttggaggggcgttcacggacttcgtagagggagcgttgggtgacaaagtgcggcatgatctgttgcaccaagttgccgaagactgtcatcaacatgaagacactgaacatttgattctgcagtccttgtatactgttctgggcgtggaagaaggagaagccgacgtagagcgcagtcaaggtacatagcgcaatcttggaatagatgtagactggagttcgccagtactggctgaacacgcggaggagacactgccagagttgaacactgaacggtgcggcgaattcgtggaagctggtaggatcgttgtcggttgtggcaacgggtttcagagagaggctggacttaagctcggcgaggtgattttgcacttccttgcgctcagggctatcgcgccacacggcaggccagtcgatctcactgtgggttccgggggcagctccaatgacctcaagcatccattcggcaggattggcttcaggcgacagcttgggcgcaccatttcgttcaaagtagttagagagcgtagaagatttttcgccaatttctccgaaatagacagtcctaccgcccctggcgaggaataggagacggtcaaatcgctggaagagcatagcagacggctggtgaatagtgcagagaatagcctgaccgtgcttagtcaaggtatcaatgagatccaagatagaccaagaagtttgactgtcaagaccggaagtaggctcgtccaggaataaaagcagttgtggcctggcagctagctcaacaccaatagtaagacgcttgcgctgctcaacattcaaaccttcaccggggacaccgactacggcatccgcatagtgttccattccaagaagcttgatcacttcctcgacgtagtcgagtttttcctggcgagagacgtgacgcggttgacggagaatagcactgaagcgaagagcttcgcggaccgtggtagtgtggagatggagatcctgctgttggacatagccagtcttacgttggaaggagtggtcgcaaggacggccatcaaccaacatttcaccagaaacaacccccattgtcacgcgcgtagcaagcacatccaagagagtggttttaccggctccagaaacacccatgagagcagtgcaggtaccgggcttaacccagccgtcaacgtggtcgagaatgcgacgttcctctttcttgatgtggatgtcgtaacacacgtcttgccattggaagatagcagtttgtctctggattgcggcagtggtttcttcgccgtagctagcgccatccttcttctcggcaggggacacgctgtgtgtttgctcgacatcatcttcagagctgccgaccttcttgggggcgtagccgcgacggaaaagcagaacctcacccttggacttggactcggaaatgtattcggtgccgatgaggtaggtgcacatgaagaaaatcatgaaaccaatcatgattcccagatttctccacttgtggccgtgagagtactggaagcttgcagtgtagtaggcctcgccgctgatatagtcctggccagccacagctcctttcgctccgcagatcttgttgtaccgaccgacatccgtgtaggattcacccaccgggatgaaagaacccgctttgcatgggaaatcgcgaccgtggaattcgttcacgatcaaggtttcgaaaccataagcaatcgggtcaatgtagttcatccagcgagaccagccaagcatgttgcgggttggtatagtgaagccagtgtagattaccagaccgagaatcaggatggcggcgggcactagagcctgcgacaaagtacgcgagtaagaagcgatggtacggaagaccatggacatggtcatggtcgtcacgaaagagaagagcagaaaggtgaagaaagcgccgccggtttggcgaagaccagtcatgaaatagagtgtgatgttgaaggtgaaggcattggtgattttgtacggcatatcacacagcattgacgagattgcttcggcaaacggatgatacatagcgtaacgggcttgcttttcgacaataggacgttgcgcgtagagagtgagaatctctagagcactggagaacgagttgagaagaacggcgaagaagagaagggcaccgcgagagtagaaactggtcacgtcgccaggcaactggaagaagaccgaaccaataatcaatgccataatggtgtttccaatcaaggcggatatagtcagactgtagtcacccttcaaacgctggaaaccacgggtcacacagatttggacctgctcggcgactgatagggtgaatggagacttgacacgctgcctcttcgactgcatagccttgcgagactcgacgaatttctcgtaggactcgccgccaatgggatactgctcatcgtactcggcaatctccttcagaagctccttgtacgcagcactgtttttccaagcagtggcgaactcatcgggggtacggggaacgacgttctcaaagccaggtttgacgactcgctcagcggggctcgtaagcgaggtcaggaaatcagcggtagtctggcgctcgggacactcgaagcccatgttggtgaagaattccttggcctcggtggtacggccgaagtagatctgtcggccctcgtatagcacagtcactttgtcgaaaacatcgtaggcactctgggatgcctggtagatagcaacggcacaggtagtgcccgagtacttagacatcaagttcaatgtcttacagaactccagagcattggcactgtccaaaccacgagtactgttatcccagcattggagagggctgccgcagagggtggcctcggcgatactgacacgcttccgctcaccaccggagacaccacgaatgaaatcgttaccgacctgggtgttgatagtgtgcgaaagaccaagcatagccatgacgacatcacgcatatgctctgcgtattgatcgcgagtgacgcccggcaaacggttgcgcggggcgcgagcgagagcagcgaacttcaaggtatttccaaccgaaagctgagggaaatgcacatcggtttcagcggtgtagatggcctcaccgcggaactggctgtgcatctgcttgtcggagattccttggtagttcatatgagagttaccatccttgaagatgccgttcaagtctcctgcaatagtcttcaagaaagtcgaacagccagatccaggacggccgagaacgaccagcatctcgccgctcttaacgaggccatcgaagtcgcggaggatctgaatcttctgcttgccagtgccggtcatcgcacggaacacggcgccgatttgcagaatggagttggccacatccttttggtaatcggtggggctgccaaatccgtgcacactgaggtttctgaaggccaggcccgcctgacgcttcgggtatcgttccgggtcgcgagattggatggcaaggagattcttcatccaattcttggggttgaaattctcactgtgaggattgagggttgagtcctcatggacttcgacgaaagggttctccgcattctgggttgagacagagaagtgtgttgactggcgggtgagttgccgggccaggcgagtgacctcggcctcggtgtagtcctcgttgccaatctcgcccttctcattagcggtgtcatcggtgctcacgctggcggtggggtcatggcggcgagcttccatgttggcggaatgggaatcctctccgtcctgggtgctgggattcaatgtccctaggagcgacatgatgaccttccagcacggtcactgtcgaataggggatggaactgattaagtggggtagtaatccctagaaaagacggataggggagggaaccatcaacgggatgagtatagagagagggtgtacgaatattagttaatagaataacgaaggaaggcaatcagcgaagaatttgaattaagtacggatatgaaaagacacaaaatcccaaggattcaaaagatctagagatcgggactcggaaaagctgtatcctttgcccggaaagaaaataaaaaacggggactcccgtcgaaactgactccggggcggagctggtgactttccggagattccaatcacgaattttggtttcgtatttttctgagactttagctagtccttagtggctgattgccaagaaactgtcgccattttccttgaatttgttgtccacagaggtaaggtagagcatgcgatggatgattctacactgcatgtacctggtacttccgcacgacagccaaacaaagattacctaccaggcataatgatgtacctgccatgttcttcatacatcctacacgtgtccatgccaggtgggaaaacaaggtttccagactcagcagcccgggaccaccgctatccgtcccacacagggctcggatgctcgggtgcgatgcatccgagcggggctgactcagctattcctgggggatccatggatcttagaacgctaaatcgcatgtcacttccacccactggggcaattgttaattccatcttatctccgtcccctaaccccccgtacttggcctcctaaccccgaattacatggatgtatatgtatcttccaaggttgggaaggaatggaccaaatccggctggtttcttctgagtcatgtctccggttatgaaattccttgcaaatctgacgtaccaacatgtggcactgtcagatacgtgctgatgaacccttgcatgggggctgttatgcggcatgatggttcgttgatccttggacgagcctagccagacgctaggctgcaatgcttacgcttacgccgtgctaaatacggaatatgccttcggttagcagacaatttcaaaatgtgaccagaatgtacagttataagtcggccacgcagggaaagcgaaatattgaatcataatagtctaaattgtacattggatattgttaagaaaacaacagcggtgtgtcagtcttggtcttccaaggaacccaattatggagaccagtcacattcaagacatgtcggtcaccacctcgtcatcatctgcatcgtcttcatcctcgtcgattggttccaccaacagattaccgccacgcccaatcttctctctgatcgaccctccctcatcaacagcatacactactcgaggcatcggtgagaccagtcgaaatccgtagtggtgcacaaacccctccggcgcactcaccacaggacgctctgtatcctgctcctgtaagatctcgtagcactcaaccaccgcgtagatctcttcaatgtctgcatctggcgcaaacttacgcatgatgcgctcgccggacgggagccgcacgctaatacgaacggcatctttgacatccggcccgggctccgcgctaagcgattgcccgcgccaaagcttccactgggcgagatcgcggagccgttgctcttcagccgcctgtcggtcagcggcttcctgttcttcgcgttgacgtgccaactccgcttcccggcgctggcgcgcccgttcacggtcgatcgccagcgaccgctcgtaggctgagtcttgctcttcgcggaggctgcgcgaggcttgttgctccgcgcgtgaagatcggagtcgctccaggggctcgctgttagatgtcacgactgtccggagcttgttcacgacctcggatggcgtcgtgagacctgcgatccgtcctacaacagacatcgcggttgatgaaacatttggtgtatggacgatgaccgctgcaaaggggaatttggtgcatttcaatgagttggcgacttggtatgcttcggaatctcgcacgttgccgccccacaccaggaggttgttctgggggtcattgatgaattctacgacctcaggtgccagcagagtatcccggacccagctgtccgtatcgtcgtgctctggagataagagaatgaccaggaggtacttcaagtcgcgatgggctttctccagcgccatgttgtatccgttctccaggaatggaatcgggatagattcatattcttcttcgaactcgcggataaagcgagcggcagtatctttgggaccgagggatcgacggccagtggtattccggcgagcaccttgcagcgcggggttcgctgtcctgttaaacaagcgtggcaaaaaagggaagaggacaccaaataggcggaatgaactgcaaagaattcggtataccaaattaaatggagtgagaagtaggctaagaataaatggaggtcggtaggttggctggtctgccggctgtaagttaactcgtggcgccaaatctgtagctgtggcacgagcaacttgcgacaagtgttcggtcaaatcgtcggtcattaaattctgggttcggcgattgggttgggggggaggggggcgatccaaggcagcgcgggcttcttcaacgggatctgggccttcgccatcaaaaaacttggatatggcaatctatcatgcggggatcagttaaacgctcgtacgcttgactggaagtcggggaagatagaccaacctgcacattccattgtgaccgacgtagtagcggaattgcttcggaaggttcctgactggtgacagccatgtacatttctagcgtagacttctcgctatcagaaagcccgtccaggtcaacctcgggttgtgacatattgttgtagaagggccgtaagccataaactcagggatagaggtggtatcaaaagagagaaaaaggaacagccatgaagcggaagatcatttgaggtcagtcattaagcacgtgcagaatttctcatgcgtaaatggtaagaacgacgtgacgtcgaggctcaagtggcctcaagaagctctcgcattgatgtcctgaccgcctggtccgtgcttatcccccttcgctcgagttcggttctcgccccgcgtcttcgtttccatcagttctgtcgcttttaatcattccttgggaggagagacgacttcggtcttatccttatatcccattcatgcctattgttatcggctgagataccgcccgacgtccgtgggctctcccggaattgacccgccgccaattgcgcggaccgtaggtgacttgctttagaatcgaaacaggggaatgcggttttcacccgatagcattctttgttccctaccgagtccggtttcaatggggatctttttgcgctgatccgcaccaacaaagtgggtatcagctagatatcatggcgtctgccggaaagcctccattggaggatgctcgtcggacgacaggatcaccgaaaatgaagagccgtggtgagtgtgattcgaagtcaaggctggcatttcagttccattttaggactgagatgggcaagctggaggtggatgaattcgagatggaccgagttgctgataacaatgattttgcccgatagagaatgcgaaagacacattgtgccgtaatgtgaccatctatgggcgatgccgctatgaagacaaaggtattgcgaacctgaatcacggccagcgtgggtggtgaagctgatttggaacttttgtatccaggctgtgctttcaatcatgacccgtcgaagctcaatgcaaatcagtcggataggtgcgatgaacacttggtctctatacgacaactggatgtattttgctaacaaggactgtttcgtttgatagcaagaagcggttcaatgtcgactcacctagcttcactccatccttgctgtctgggaatggtgtatcagcaccaaaaaagtccacagctatatctcccaaagctgccagtgcagctccttttcaacctcgaacaacctcatcacgtatgtgctccatgtggagagggagggaggttccaaaagcattcactgacgtcagaaaaaggttcaaacacgagtacaccaacaacacggtcagaagcagtgcaagactgggcggtggccgatgtacaggaatttattccccagggatttgagcacgtggtcagtcgtccctgcccttatcactcgattcgcatcgatttcctcccctctacctcttgtcttcttacccatccctctttacctgcactagccctattgttatcatcatctctatcatcacgatggtgctaggtggcttgtctgccatggcatctgaattcgatcctgaatcttctgattctccccgatacttcacctctcatccgcctcagcctgaaagccctgggtggttcaacagtattctgagcaatcgtgctaattttcctactcagacgcctcttcagggtaatggaaacggaggcatcacccccacgggtgcatttgatccttttgttactaccccaactgccatgactcccggtgccgttggccctgtttctgccaatccttactcccacgaccatactggcgccatgggaggtgctttctttgcaaaccaaactggattccagcagccggtacgttggtttccattggatcctctttgtttctttgactgatctccaactgcccaacagatccagtaccatctttatgccccaattggccctcacagccagaacacattgggataccagcgcaacgttcatgatctttttattcctaacgacttgcgtgaagaactgcagaagaaatctgcagctactttacaaactctccctagtatgttagacatcacccaataataatttttactcatgctgacgaacttgaagacacccaactccctgcccaggtcgactacttccattccctcgtccctctagatctcagtcatcagaagaatgctgcaatctttggctacccgagctggatctacaaggcccagtctagcaaagatggcatctattatgctcttcgcagacttgagggtatgacaatcttcccgtctcttttgtagctccaaactaaccgtgtaggttatcgcttgaccaatgagagggctatccgttccgtgcaagcctggaagcgtatctgcaacgccagtgttgtgaccattcacgatgcgttcaccagccgcagcttccaagacagttctttgatctttgtgaccgactatcacccactgtccaagacccttgcggaccagcatctcagcgctggaacccgcttcccaggccgtcagaccaatgctcatattcctgagcagattctctggggctacatgacccagatcgccaatggactcaaggcgatccacgccaatggtcttgctgcccgagtgctcgagcctagcaaggttttgcttactgctaagacccgtgtccgcatcaacgcctgcgctattcttgatgtggtgcaattcgatacccagcggactatggctgacctccagcgacaagatctggtcaacttcggccaaatgatcgtcacccttggcgccaactcacccactgtcatccacaacccaaccaaggccatggagcatttcactcgcgcctacagcccgcagttgaagagctctgtgttctggctgttgaacagtctgcagaaggatcaggagcgaagcatcgacacttttatcactggcatctcatcccagctgatgtcaacttttgattcggcactccacctcgatgatcagctgaactctgatctcggccgtgagttggagaatgcacgacttgtgcgcctgatggccaaactcgggttcgtcaatgaacgccctgagtatgaacttgaccagcgctggtcggagagcggcgaacgctacttcctaaagcttttccgcgattacgtcttccactcggtggatggccaaggtgatccggcggttgatcttggccatatcttgacttgcttgaacaagctcgatgcgggaactgacgaaaagatccatctagtcagtcgcgacgagcagagttccttcattgtcagctacaaggaggttaagaaggctcttgagtcttccttccaggctctgatgaagcctgctagacgcatgcactagcaagttttcgaaagttctcacatggtactcgtaaagatatcgcagcttgctatgtttgtctcatagtttaacccaagggttacatcttttgctttaatttgcaagcaccgatatcgccaccgtgattgaaatacaaacataggaataaagaaattcaaattgctttccttggtcgtaagcctgtagacatctctcacaattctcctcgagtcatcccgtagacgcaaccatccaatctccctacaagctcctcaatgatcagttccccatcttcatcttcattttgatcctgaatcttcctggggggaatcaatacccgatccaaaacatgcaccacgccatccctcgccaacaaatccattcgtccaactctaccaaacccattaacccgcatatcaacctcaccaaaccccttcttaacatcaaccctcaactccctcttcaacaaagtcacaagccgcacattcgcatagtcctcctctagtccatccccacgtccacccttcccctcgccctcatgcgcatgcccaccatggcgacctgaaaacaacccatgggacgttccaagactactatacaagacatccgagtaaaacgtctgatttagcacaatatgatactgcatcaacgtacgcaggcacccctcaccccgccgcgagaaaagaaaccgattagccttctctccgagccgtctgaaagcgacgttcgtgggcacgaaggttgtgccgccctgtcgctgcgccgggtcaagattgtgggcgagtttcgtgcgagctagcgccaatgtgaaggtgctgaagtcggttggtgcttggtgcagtatcgtgcgtgtctctcggggtgggtggaggggactggttattatgtggattattccgtttttggatttcttaggtgaggttagtatctgtcgatgtgtgccataaattgatgctttactcaccatgtcggctgccacaaccctactcctccggttcaacatcactccgttctggtgctctcggacaacgatcctctgtggtagagtcgattccagagctggctctgtcagcttcgtcggtagcgtcccgtggccagcaatatgctcgattgaaaattgaccgggcaggatatgataccgcagcaacttggacatgagcttcggactggggccatttcttccccgtggaagtctctctagggcacggttcgtcagcgcgaagaaggtgtggtttgccgtcgtgccatttaggatatcaatcaggtctttgtcgtcggcgatgagctcggcgagtcgggatgtatgctcgctttctctgatgagctcccatgtcgtcttgtccgcgtggcagaacgggcctggacaagcatcgattggccggtgtggacggtgtcggtatctgtcccatggtcttccgtcgcggtcgtgtctgtcttcgcaatcacctcggtatccaggccattctccgtgttcgggccatcccccatgtctgggccgatcaccaccgggccatcgcccgtagccaagccaatcgccatgctccggatattcatcatcatcgcgccagtcaccgtctcttccccagcctctatgttcatccggggagatgcccagcaggctcatctcggcatctgcttgagatggatcattcgtggctggtcgagtctcagagactatctccgcgaggatactctcatctaggatgacaaaggccgaggccaatgaagctgccacagataagaaaaggtaagtggaacgcataatgccgttatcgacaggaaatcggagtccaatgcagatgctcgatcacacaatggtgatgtacctatataggaaggcctccctcgtcgaacccctcgactttcttgatcttcggttgtacgagtcgtacaaagctatcacactacatcagatagcatagatgaaactgttaaatcctcgctgatccggtcgtcgtaccgtggagactcgagaaacaacttggatcaacaagagcaccagccatcgctgagaatatgttacatattccaatcgagaccagaagcagcggaatacgaataggatacagatattcggactatatttggcagtctcagttccgggctaacttgagatcttgcattcacgtgcaattctaatcttcttcttactagaacgaaaaccaggcagtatcggaagaatcggttatacacgtcaagatgtatttctcacttatacctgtttttccatatagcatttaatccagatccggcacaggcagcccattgacaatcttgactttccgtcctagcttgtccagcgcgaccttggagttatgcgcacgcaactctttcgtctcttcgtcggagacaagcacaaagtcatatgtaaggagagcatggccctcggggacattatatttcctagcgatctccgcgtccgccttaccaatttctacagtcaaggaatccttaacgccgaagaccgcatcagatgtttcataagggtcatttcggagatagagagcgctagaacgcagattagcataccatagcccacacaagtcaaaaagggcaacagcccaacatacgtaaccaaatggtcaaacccctccttctcaaacataaagtgcatatgcgaaggccgatacggatgccgccgcaacatctccagcaacctcccaacaggcccatcatgcggaatcggatacggcaccggcgtaatcgccataaaccaaaacaccccgtcttgatccgagcgcataacacacctcccatccggccccaccctcccagcatactggacatcataatggcccgtcgaatccgtctcccagatatcgaccttgacgtcgtgcaccggcgccccctgcaaatcccgcagcgagcaaacaaccagcaacggctcgccgtgcggatcatgcgacatggacgcgccggcgggcatttcctcggcgtcgtgcgtgtggaacgggcccagcacggttccctctgtggagcccttcggcttggggtggtcgattgagtcgacgaggatcgagaggcctaggacgtcggacagcaggatgtattcttgtcgtacgtctgtacaggcttggccgacttctgttaggaagttgaggccggtcatccattcggcgctgctgagacgggtttcgcgcgcgaagtcgtggaggtgcgttactaggcgttcgaggatgtattttaggcgtgggtctgggcagaggctgttgatggtgattacgttcgcggtgatgttgtccacggtttggtctttcattggggggatcttgattttggaggggtccatggtggggttttgtagatgttgctttgaagtgtagaggggaatggtagatggtgaatggtttaagctggaaaatccggggttaagctgtttatatggtatagaaggtggggtgtggttgtttactttccccaggagatacaagttctctcaatcaatcagacgctctcgaatgataaccttcagattgtttcaccccgcaatccccgctgatccccccgtcggatgtcagatcggatttatatgccgtagctcttgtatacgacggggaaacctatccgacgggagtctttagggcagagtatatatccggccccacagatatctgaatccattctagtgtatgacacagaccaacgtagatcagaggccacgggcgtcgggcattgaagaagtagataatattttacatagtcattctaaaggagataaagtagatatgttcaatgagagaagaaaagaaaaaagaaagaaagaataacgctaaacagagggatatctaacatagtactcccacacccaacccattgccaatatgtaaaaacaaaagaaaaaagtacaaatcaatacacagaaaagtcgatattttacgcatgcaccatacgccgatcacgatcacggtcacggtcacggtcacgatcagcctcacgttcccgttcccggtcccggtcataagaaccagcattagaagccggagccgggcctgaagcaggaataacaccggcagcagcactcatacctgtgtgttctccacgctcggcaccaagctccctcttctgcacagcggcagcgacgcgtgtgtgatgatcaacagtatccataatagcctgtctaagacgttgattggcatcgggatcttcgtcctcggagcgatccgagacacgaccagcagggacatgagggcggtccctcttttctgtctcgctcactgcccgtcgcggggaattatcacctgaaggaagctccatcgggaccgcagagccaggagccaggttcggggccgaaggggccgactcacggcggtgttggtagtaggcgttgacctctggctcgaagggcggctctcggggatgctcgcgctcggcggagatcgggggtagtggacccataaaccggggtggggtgacgtttgagctggagcgatccttatcgggacgctcgttggataccgttgaggtggtgatgcccgcacgcaatgctgccacttcgtcttctttgacgtcgcgccaggagcacttggcgtgtttcttcgtgcagccaacgcaggctgtgaggttcttgagacagtccatgtggaggcggcggcagcggtcacacggtgggatgacgcgctcgccgcgctggagctcttccatgcgagctatcatttctagcttgaaagggcccccgtcgtctttttcttggtggattgattttggcggtgggaggagggatgatggggtgcttgggatggcgactggggttgccgtcgccgggttgtaaagactgtagtctgctggatcggaggcacggggccgtgggagtggctgagggttggctgctggggctgctgcatcttcatagccgcgagcgtggcggtcagccgttgtgaaaaacctcttcatcagatctgcacgggtggttggggaggcacctttgatcgattgtccgttgatcatggtgacattatcggtggattgtgagaacatgaattgagatgattgggatgtcacagggttctcctcggtgtgctcgggttcagggcgatgggcgttgacagcgacgaaaccagacggagaggggtgagatgatgatacatggccgttacctgagccatgaccgttggcatcgcgccacacttcggggacatttcgggattgcgtgtgtagagaagcatcgttctcgcgtcgagtgacaatagcattgcgacgattcttcaaacgatggttaagctgtcgcgctcgagcagagacttgaacacaaagattgtcagtcaactcctaaactgatatacatagtgattccttaccttgatcagccatctggatgatatggtacaagttcttttcaagaatctcaagcgcgcctagctccttttcctcatcctcgatgataggctgaggtgggatcatcttctgcggcatgccagaggcaatcaaaacgaagtcctcctcgctgatttccacgcgacactgcttggtatagaactggcagactcgcacgccattgcgcgacttctccagattgaattgctcgggcttattctttgcgaattcgaccacatcgagccaggtcaccgtgggtccgtctttaccatgggatttcaacacctgcggcggtccatcgaacagacgctcgaagcgcttgatcaagatcggaccgagcgggcatgcgcccagatttccggcaatgctctcgtgacggtgtagaacgccgtcgtattcgccgagtagatggatgatcgcgggcatggtatcgtcgatggagacgagtgggaggttgtcagggtattgccgtgccagataatttatctgcaggtggttcgagtgcgtcttgggcattttcgatgccatgccatgatcgttggtgggagaccgaggccgcttatgagaagacgactccgttgttggggtgtgagattccattgtgggagttaggagacccctatgtgcaccctggagtggtgtaggatggtggaaagagaggaagagaataagattgggaggaaagagaggagaaatcgcggagagtgttcagataagagcgcgaagtatgaaactcgcgcggagatgaagcggacttgcgcggagggaaccggcaggtgactcctttttagaagacttaagctacatccatgaaggtggaggaatgagaagagaagtgtacgccttcagagggacggaacagcgcacggggagtggagaggaaaaacgtgatctggatttccggttggagtcccggggcttgaagagtcggttttatttattttatttttttggtttatcgtttgatcattttcctgtgattgacgaatcgtgttacgcagcaattccgaactcgcacaatgtgaggatctgccaccaaagtacctggtcttaagttgtagggagtcctcagcggagtcccgccggagggttccgctgacctgcgatacgctgcttcaactacacagttacaccttgcctatagtctcacatattttgtatgcagaatggcttctacatggcagtcgatcattctatacatgacgactgttatctctcgaaaaataagcctttcagccttgtggagtgttggtttcgctgatgcctgaacgggccagcgggctgaaacattttggtcccggggagctcggagggaatcacaagataatcatctggcctgggattcgatttggaaaaggaactcgaattggtacatcatattctgaatatccatagatatacatacacatgcaagtacgtggaattcaaggaatgtatggtcttcaacggtgaaatgtccagacagctgataagatacatgtaatctcgctgttaaatacctccgagcgggattcctcacagccgtcaagcgcaaaaatacagcggtaatcagtaattcccataccaaggcggactccttcctgcctgaggccgccgtccctaaaaatccctcatagacgcgcccaccttgcttgtaccttccgctctcccccagacaacagagaagataccgagatacccgtctgtgtccatcggatccaagcttttattccctcacctattatcttccttgctttttctaaatccctcaatttcacacgccatgtctgaacgaggctcgttccgaggcggtcgcggtcgtggaggccgtggcggccagggccagcagaaaagtggcggtggtggcggtgcacaggagaagcccaaaaaggaaaacatcttggatctcggcaagtacatggacaaggaggttcaggtgaagttcaatggtggtcgtgaaggtatgttggattatctcttctaatatttgcttattatctttctttttcttctgcttttggtcttgacttctcatcgcatccatctatgaaccatatatgctaactccaataacagtcaccggtactctcaagggttacgaccagttgatgaacctggtcctcgatgacgtaaaggagaccatgcgtggtgagttccaacttccttacttgaatctaatctattatctctgcttatactaacccccacagacgaggagggtaacactaccacccgctcaatgggtctgatcgtcgcccgtggcacgttgatcgtactgatctcccccgccgacggaagcgaggagatccccaaccctttcctgcaatcagaagagtaaaaaaaaaaaaaaaactctctttcacgtattatcttctttccgggtttcattctttccggatcgggacgtcatttcaggaaatggacatcctgcatctagttggagtttcaaaacattacacaccttaatgtcccaatggctttcggcgtgcgccggaacatacgctcatcagtagctacgaagggaacgaacgcaatatgatggtttcgctttttttcttttctgtcgacttggaatgtgcatgataggactgctactgtggtgcagttctgtctttcgtctctattttcttctcaagaggaagtgatgaatttgggatcggctcatgatacatagcaccacaaccaaactaggatataaccgaaaaaaatcaatatagtcaacacgagagctatccaagcgaactgaactccgtaggtatcatgtattaaaagctaacataatatattcacatactatcctgtacactcccccgatcgccgatctactggcccacttccccagatgtaggacccaccgtctctccaaactcagcggagtcatcggaagcatcactatggtcatcgggcaaagaaacccgccgcggctctgcatccttcaaccttcttacaccctctgcctcctcgacccagggcccgaccttctccgtgccgtcgatatactcggcagcaatgcgcagattcagacccgcgctaagggcacgctcgatgcgggtctcgcgattctgagacacaagcgtgcggaaaacgtgcacgaagaagccgccgagaatatcaacgctccagtcctccggaacaagctcaagcacttcacggacatcgaaccacgccgcgaagcgcgcgaggagatcgcttgtgcgctcgatacggtcggacacgtcctcaatgtggagaaactcgtcgagcaggtggcggaagagcgttgtctgtaaggtgtagtctgctagttctggtaggatgcctgttgaagaggaagagctgcgcggaccgccgaagacacagtagcggattgcggagtcgtagtcgcctagcccgtgtgtgaggagatggagggccgggctgtggtggccttgtaggccgtcgaggataatgcattccgagactagctcgttctggaatggctcgatgcgggtgaggacgttggggattgagtagctgattcctgttgggaggggttgcgaggtaaatcgagagccggagattccacccagcagctgaagtaaccggagtcgggactgccaccagggctctgtgggggtgttctcgattatgaagtttaagtatgtcggtttgggagcacgcagggctcgataggtggagtaggattcggccaaagaagcccgtgcttcgggggatgactcaagcacggagagtaccgtgtctaagtagtatgagatcaggtcgtcggcatattgcgtgtactatatcccggtcagtgagatgtgcatggactaggcaacatgacgtcttacattctttgcaaataccaggtgctctaggtagacctggaccgcgtttggagctcgctccttgagtaaagcaacaacatccgccggttcgagtctaacacggctggcgttgtctgcgaatatctggatgcccagattggggtttcgcccagccagccaagagccatactcttcaaccagctgcacgtcctttatcttgaccaagtacctgcgcatctgcgtctccacaccatccgcggagacctctccgccagcgtcagtctccccatcaacgattcgctgccaggttttgagcacgtttcgagccatctttcggctttgatacaaacggcttagcacatagagccgcttgtatgtttccaggagcatcactgctcggtcgaaattgcctttccaattgtcgaccagcttattcagctcagcgcgaattggcgacgctgcccgctgatctcgcgtcaggtaggcgtcttgttccaaggtcaggtgcaagagcgcagcatctgtgctatctaaaacatatgtctcatcggtgatactaccatatccccgcttctgctgccaggagagaaggaatcgtttcaccatattgagaacaggactgcgagaagcatccaatccagaggattcgatgcctatcttcccgacttgttcaagatattgttccgccatgcttgccagcccagcgtgtatccatataccctggggcccctgcaaaacctcgcatcgcaacagaggaataaatagcaatgccaaacgcggatcgaggttacctgccagcagcgctttctcggtgccatcgattgccgtggcatcacggtcgtctggctgcatggagaggaggtctccataaagcataaggctggccttttgtttcacatagctcaatccaataaattcggcctcggtctttggctcggtgttctggacggagagtagcagatccagaatggcatcccgacgcagcaccgtgtgctcgttctcttccgtttcctgggccctctgcagggtgtcctccagctggactatcaatggattatgcagtacgcgccatatttgagatccagaccacatgacaagactgctctggaccttgcctagtccacgtgcaaattttgcttcttcggcattgcgttgagcctcccagccttgggttgctgagccgtcgctcttcttgattccctccgagtcggccaattcttgcgaatcgaacagctctttctctttttgggagtgctcgatagatgcctcagttctcgaatctgctaccgacacatgcggtggcagcgtcgggtttttgaggcggaccatccgcaagagctgcccgatttcgttgagctcaagatggctagggctgagggtatgtcgaaggccgacttgggattgtgtctctccgggagaaggtatctctaaccagctcttggtccgctcaatctcccctgggtcgtcgtcccaacgttggatttcgagtcttgttcggaacttcccaccatcttcgtcttcgataacagcgagaacaaactcctctttggcatcttcactagtctgaaacatctcatcattttcgtttgtgtcaatcacaaccgactttggaaatctgtggaagttaattgtgccccggacaacttcaccgtccatgtcgacaaacatgccaacgcccggttctgtctcctcggttccggtcacaagtagaaactcagaaggtgtcggagataccacgtgaggctggagacgctttccttgttttgttggcggaggtagaggtggtaagggcttcaagctgtcgttggtgggagacttattgtctgactctgggtcactagggggcttaggggagctctttccatctcgctcctcagagcttgatcttctgggttccccggtagatgtgaaaggatccggtgtccctgatggtgatctatctagctgggccgcttgtgcctgcggtgagagcatgcccacaaaggtattcatactattgcttctgccatgccccgaggcatcacttggtggagaagcagggtaggatgaagaaggtgaacgtttcagcggagtgcgcggcgctgggttcatgtcttccacatgccctgactcaaaaacctcattcgaggaggatattgggaagagcgggatcttctgttgatgcgccacttcgagtaatgagtatgaatgtgtatccgcagcacatgcgatcgttcctcgtcgcgctgcagtcaagcaaccaggaaactcgatcttcttgatccgtcgcgcctcatccccaatctgaaccagcatgattctgttctgcacagcaatcatgatagtcggattttcgccttcctctgcatcccagttgagatccaacccaccgatccagcggcagtgattgacctttgtggctccaaaggccgggctgagctccggcagcatgtagaacgtaacggtgccattgcagagaacacatgccttgtttactgaggacaagagaacgatttgtcgaacaccttcctgatcagtacccgctgggggactctgggcgaataggatcggtaatcgggatgccaatataaaggtaggttcggcggtttcgtctggggatgagggcgggagacatacgaagtgcaagatctcggctgcagatgtgccaatgtataggttttcatctgtacaagattagtcagctctggggccatccatggatggagcaggcaccgaaacagatagagcttactccagtattcaacacaggtgatgtagacgttgtcgctatgctcagtcgctaacggcacatccccgaagagggaatgtaacaaatacggcacagccactggtggactggtcttgcgccttttgcgtggaccaattccatcgtctgaacccatcatgagactgtagttctgagcatctccccgcaagcttggatcgtgacaatgggagggcggtcagtagctggggccaaagctcaggggcaactaatcgtatttgtcaggcagaagataaagcgatcgacgcgtgtgaagatgcaatcctagctttgtacacattagtattgaagctgattctctaggacctaaaagcttattcttaggctttagtttggtgctctctgtcttactaattttatttacaatctgaagctttaaatgcgatgctcaagtaggacataaaggcggtcatttaggcggtcaccaatctataagcggtcgttgtctcctgccatacattatactgttggaaacgggtgcctcgggttaactgcggtcgccttgaaacaatacactcattatatagtctccatgcttgaggtccctgggtgtcctctcaccttttgtatcacctttgtcataaatctgtattcaacaacgccaaccacagatcgtacgttgtacatacaaccggaacaatatcggcccgttcgccgcgtgtcctgttcctcgcgataacatatctccatctctccccttggtggactgccatttgatgtggggtgacagtgcagacccctggggttaggactgacaatggattcattcgccatcacagagagtttggtccctcaggaccaacatgacacccaacctgaatcacccatgtccagcaaattaaccgaagagaccaacaagttccaacgcgccatttcagcctggagaggtaattatcttcttatatgttgctgagtctttactgacatatctagggattgatttggccaacactattgcgaaactcgataccaccgctgcggacctcgttgaacaacagcgcgatgcactcgtgcaaagaaaggacctggcacagaagacgaaagcctacaagaagctagacgatgaatctaagctctcggaatataaaacactactgaagtcctatcagtcctttatcgatctcttgaccaaccaaggcaagacgtcatcgtcctcattcttacaactatactcttccttatccgaagctccggacccctacccactcctagaagcttctgtcgactcccttgtcctgtccgaagatacagttcccaaactgacctcagaacgggaccaattgcagaagtcggtggatcgtctcaccagacaacaagaggagaccgagaaacgcctacaggaggaacgtgctgcgcggaagaaactagaggaaaaccaggaatcaagagctcaggaaatcgaagcatcgtgggaagctgttttgacagaaaagacaaataactgggcggcaaaggagaagactttagaagagaaagtggaaaaccaggatcgattgatcaaggagctcaaagcaagctatgaggtttcccagcgcctaggtgagggtgggaatcaaggtgatgatagtgagggttcgcggagtggcgctactgcagctgagctcgagctggtttctgccgatttagagaaaacgagcttgagattggctgacgtggaagcacgcaatgaacaaatgcggttggagctggctcacgctgtatcacatgcatctggtccgatttctgttgaggacgaccccgattatctacgactccagtcagagaactcttcattgcttcgcaaactagatgctgcacgatttgacaaagactcagaacgacacacctgggaagctaaactgcttcaatcggagcgggcagcttctaaggcagcagtggaaagggaagagttgcgtgtgcggttagcaaaggtagccgactacgatgagatccggcgtgagctagagatgatcagatcgattgagttcgcagctggcgatgatgatgagccgggagacggtgctggtggtggttctgcggttgacgccaatggtgagggggccaaatccaaagacaagaattctctggagcaactccttatggcccggaacaagaaattgacggatgatctcaccgtcctgcgaatgtcgcaccgcgatatccacgggcagctcgaaacactacggaccgagctttcgacttcgaaggcagagctggagaagtcacgcaccctggcaactactcttgagaatgaccttcttcgtgtgcaagatgaggctgcaaatgctttcccatcctcggcgatgtctgttgcaggaacttatacctcaagatatccatcttctgcccgtcggggcgcgtcatcgcccacctcatccatcatctctggctttgaccagagtgcagtgtctgcaaacaccatggaatctatccgtgcaggagaagccgttggtggcggctctggcctcctacccatgatccaggcccaacgcgaccgcttcaagaagaagaatgctgagctcgaagaagagctatcaaagctatatgccactgtcaagtccctccgacaggaagttgcatcactccaaaaggacaacctgagtctctacgaaaagactcgctatgtctcgacctacagtcgtggccagggtgcctccacatctgcatcgtcgtttgcaaatactcccagctcaacttctatctatacctctgcagatacgccttcgggtctgtcccttgaccgataccaaaacgcctacgaggctcgaatctcaccgtttgctgcgttccggggccgtgaatccacgcgcgcatacaaacgcatgagcctaccagagcgtatcgtcttctctcttactcgagtcattcttgccaatcggacaagtcggaacttgttcgctggttactgctttgcactccatcttctactttttactgtgctctatatgatgagcacgacggatatcgagaaacatagcgctatgggcgccgccggtagcgccgctgctgctgcatacggtagtagcagcgggggtggagtgggcacgggtaatggcgggagtcagctgaaaggtgatgactggcagcaggaaggtttcaactaatattccaaggtttttttctggtgtttacacagcgaagagctccggagttccttttttacttttctatttttactctttctcttcatgacgatcatacgtcctggtgtctgggattaagtgtttctctgcgctgtactattctgggatgtgggtcgagagcggcatcgtgtgtaaatttgatttctggcaaatatcatgtgtctgagaccaatatagatggccgtagatttcgaatgtttccaaggggtgtgatgagcttaggtgtgtttaggtgtgtccgaagtagatccaagccctaatcacatcccttttgaggctatgtaaggagacttgtttggccctacttggcctctcgggtcggattggaattttcctaaaccccctcatatctatgtactctttctccttggagactcggtagtgttgttcacgcaatactacgggtgcatgtaggctttgtagctgacatacgatgtttggacggcattatgcttgagatatcaaaacattcttaagccctcgtcaatcccaattctgggtaatcatgcatgtcagttaggtacaaagatacctgtcagttcggacttcactcccgacgtcaatgtgatgcattagtgtcggagaattatggcctagcagatatatatatctcaccggtggcttgcccaagtcaaataaacacaggcaaaaatgccgacaggtaataaaagcaagtgtcatcggtcacataaatagatgcaagctgcgatcattacaaagggtctgagcaacttcatgtaagatggcgttatttagccgccggtgcgctgtaacttggaaagggaaaaaacaagacgggagaacggaagccaaccccgccatgtcagccaccacaatccagcattggaagacggattgtgaacaaattggctcgaaattaggactatagcatggttgaaaacatgaaaaagctctatttgataagtgccagggacccatgtagctaatgcctgcaatattttccccgagttctgcacaaatcgtaggattatggcctagcatcgatgcctctgcacactagcctatactggcaatgatctcgcacatctaacccaacacacatggcactgttcttcagtcagacttattaatagccccggggaatttatagcgctcaccacattggctcggttcgagctcctacaatcgaaccgccaagggaaaccccgttgttttgcttagcgcattgctatcatgatttagtcaaagtcgcttgcagtcgacgacaaatcagaagccaaagaggctgggagggtcagcactgggcgcatccatctaccaatgagaggccgtggtcgagctttaatccctgctagtacctgcaggttgcatcgatcactctgttaatagcacacagcattgtttcgagtcggacctgtgttactatctttgttatatgcttgaattgaaggatagttgcaattaccaccgcgtctatatgtatagctgcccctcggcccggccaatttatcatgtcaacccttcccttgtcatttcttctccaacacgcttacctcccttccttcatacttcatacccgacttgtatcaaaggcttgctgggcaatctttgattaatctcaaaaaagtcatcgccattgaccgtatatttatctgcctagcctgaacacataacagcaatgcgctttgcttccctcatcatctgcctggcagcagtttcgcttgctgccccaacaagcttccttgacgatgcatacaactggactgaggaaatggcagaattctacggaaaagtgagccagtacatcaacaccgcaaaacataacatcagagcaccgggggcttgcgatgtctctaagattgccctgccttcctatgcttcgggaatggccagcccgtcagggctaaagccaagatacgttgcactcggtcgaggcacgcaggtatgacaagctcctgagatactttattgagttacatcgctcattatagaactagaactacacatgtgcggactctacttccaactccacacccgcggctgtaggagctgtcgcaagactgtacaatgccacatgtattgcagccaactaccccgatctcctggcaaagctccccaaccttgcctacacggtttccctaccgaccaacgaagatgcctcgttccctcccgccaacctcgacttgatgggtcaccacttcttcactgatgtaacccccgagttcaacttgaacaccactcccaaaaagcagaatgggattgtcatggcaaagaagggaggtgcattagatgcaccctcaggttcagtgtcagggcagtacggtgctgtgccttggctctatctcacttctaccgatggcacggtgggcaactacaagagtgtctatcgagtcaacactgccgctggatcgtcaccaacgacctgcaagggtatgccactcgcattccaaatgcaatatgctgcggtctactacttttttggagagtaattgattgttttttgttatgtttgtatatacagaaggggactttggtcggaggattcgatttttctatatgtgaggcgggcgctatcttactttgctactattatttagttcatgaccgattatgagctggtgccaaggaattaattgttattcttcatcgatcgtactccgtagtgttccatctcacccactgcagggttaattcgacaggagcacattgcagacagaacttatattttggttggtccaatcacttcgttcaaacctacatgcttgaaataccaccactgaataatcagcgataactttgtctattttcaatcgcagctttgcatttcagacaatacagggcttaacggatcacgtgacatacacatggaggaatgctctcacgtgacgctctcacacggaggacacgctaaactggaaacaacctagcgccgttctgattttctgaaagatcccaaaggcgcaaaaaaaaatctcgaccgcatcaacgagcagcatcggtatcgatccgtatccgacagatagtcagcggccaattctgtttgaattgcttgatccaactatctctgatacgttgccaatttttttctccctctttatcgactctcggaacttttattccaattttcaactacactcggttcaagcactcggaaacgacagcttaacctccctctcctctgacttcttttataaccgagtcttttctcaacacacataaaatgtcttctttcgctcctcgtggacgtggtggatttggtggtgatcgcggcggtggccgtggtggtcgaggtttgttcagtccgatccatttgagcagcaagcattcaggtccaaaatctcgctggtgattctaccgcaccgatggccatggtcctgtttcttgttgcgatactatagttcacattgctgacttgttgaaggtggcttcggcgaccgtggtggccgtggaggtggccgtggtggcttcggtgatcgtggcggccgtggaggtggccgtggtggattcggtgaccgtggcggccgtggaggtggtcgcggtgcccctcgtggtggccgtggtgctcctcgtggtggccgtggtgctccccgcggtggtggtggtgctcgtggtggtgccaaggttgtcattgtaagtgttggaaattctcatggacatgggtatcagtcactaacgtaatcttttctcttgcgaataggagcctcaccgtcacgccggtatcttcgtcgctcgcggtggtaaggaagacatgcttgtgacgaaaaaccttacgcctggaactgctgtctacggcgagaagcgcatttccgtcgagggccccgcaactgaggatggtactgtcactaagaacgagtaccgtgtctggaaccccttccgttctaaggtaaatactcctccttatcctgggctaaagatgcatggtatccttggcgatttcatcgaatttttctcggaattcttcaatatcgccccgatagccatggctgccttattgtttagtccttcttttctaacgtcttctcccttttctagttggctgctggtgtgttgggtggtcttgatgatatctacatgaagcccggctccaaggttctttacatcggtgctgcctccggtacctccgtttctcacgtcgctgatattgtcggccccactggtaacgtctacgccgtcgagttctcccaccgctctggccgtgatctgatcggcatggccactcaccgtaccaacgtcatccccattgttgaggatgcccgtcaccctctccgttaccgtatgctcgtccccatggtcgatgtcatctttgccgatgttgcccagcccgatcaggcccgtattgtcggattgaacgcccacatgttcctcaaggatggaggtggtgtcattgtctccgtcaaggccaactgtattgacagcacagccaagcccgaggttgtgttcgctaaggaggtccagaagatgcgcgaggagaagattaagcccaaggagcagctgaccctcgagcctttcgagcgtgaccactgtatcgtcgctggtatctacaagcgtaccgcataaaggtcttaatctctggtctctggttatgtccattcccttttgatgttccctcggcgtctcgtgttctgtgatgtatcgaatgttttccacctttcttgtgacaggtatttccgcctatgtacttttggctgcgtcttaaaatttagttttccttttcgatgaattttacacgctggaatgtgtcatactgagtgtcttgatctgaggtgatgagatggttagcgtatgatatccgtacctaggtagctgcaagtggccaatacaagcgatttgagtcttgctaacatttcgccggcaacattggagcattcttgtagatatagctgccagttgttctacaagtgtctgtcgaccgatatagagcgtatctggcaaagactcagagcaattccaacaaagaagcagcacttcggtaattgctactagcatcgtctaggaatgaaaaaggtaggtcatcttcccaatggtgcattctcggacttgccccgggcctcccggtaatcggattgatgaccgaggcttgcaccgagaaaatgactcggaattgatgcgcgagaacttggactaatcgatcatattggggggatatgataatacgattggctgatggggaattactatgaccgaacgagcgtgggggagagacaagttccgcttcaaccccgcaaggtgtgttactatataatggcaacgcatgtaatttccgttctacatagttgaatatactgctattcattgcactgccctcttgctaatagccagacttaccggcatcgattgacccaattacccaaactaccttgtcttatacatatccatgatgtcgattctcatcaccggtgcggggggctatgtcggccaggaactagcggcttccctgcttgcaagcacaccagccacgacaaccgtgacaatcaccgatatcgttgagcccgagatcccagagtcggctgcacagtatgcaaaccgcctcaggtgcgtcaaggcggatctcacctccaccaaagaggtcgacgagctgatcagcgcatccaacccctacgagacagtctatatcctccatggtatcatgtctggcggctccgaggccaatttcgagctgggcatccgtgtcaacctcgacgcaacacggtacattctggaccggctacgcaagaccgtgcccggaacgaaggtggtcttcacttcatcactggcagtctacggccttgcaccaccaggattcgtcattgatgagacaaatttccctcctgtgccatcctcctcatatggatcgcagaaactcattattgagacactgctgaacgactactcgcgacgcggattcctggatggccggtgcgtgcgtctgcccacggtgaccgtgagagctggcaagcccactcaggctgccagtagcttcgccagtgatatcatccgcgagcccttccacggtaataaggctattttgccggtggccaaggagacggagatgtggatttgctcgccgcacactgtaatcaagaacttgattcatgcccgtgaggtacccaaggaggcatttggagattcaagagctgttaatcttcctgggctgaaggttagtatgcagcagatgttggatgccttgttggaagttggtggcaaggagcgtcgggatctcgtggaggagaagtatgacgctgccaccgacaagcttgtgcaaacatggactccacgatttgatactgctcgtgctttcgagttgggttttgcagcggatatttcgatggaggagaacatcagacagtttgcgagccggtttgtatgagctggaggcatgtagccaatcaatagacgcgaaattggatgaccgaaattgaaagatcggaaaaccaggcatatccggatacgttaggatcaggcaagccccatttgaacattataaagaacaaaaaagacaatatacaggccaatttagaccgtattctagcccacattatgaattaatgcagtgtaaggaagtattcgggatgtcaagggcggtttggaaaagcgggttatgtaattggctgagctgggcgaacaatttcagacttcggaacctcaacctcagggcgtctccatcagctcttttctccatctcttctcccttccccctccctccacccatacaagtcgctcccaatggcttctcggcgccttgctttcaacctaaaccaggctctccgcactcgtgcggccctgaagtccatccagcccgtgaagcgtggctttgcgtccccggttgcgttgccgtccaccacccagtccaccaccctctccaacggattcacggtacgaacatgcaattcatctcaatgatatcgcaatttagctaataatcttctagatcgccactgatcactcgccatgggcccaaacctcgacggtcggcgtgtggatcgatgccggtagccgggcagagactgacaagaccaacggaaccgcacacttccttgagcaccttgccttcaaggtccgaccctacaaaccccaaactacgaagcgcttttatctgataatatgactagggcaccaacaagcgctcccagcaccaattggagcttgagattgagaacatgggtgctcacctcaacgcctacacttcggtacgagccgggaaaccacccaccaacgtctaccgtacctaatactgatcgcgaatactatagagggaaaacactgtctactacgccaaggcctttaacaacgatgtccccaaggccgtcgacatcctcgccgatattcttcagaactccaagctcgaggctagtgccattgagcgtgagcgtgatgtgatcctgcgcgagcaggaggaggtcgacaaacagctcgaggaggttgtcttcgaccaccttcacgccactgcttaccaggcccagcccctcggccgcaccatcctcggccccaaggagaacatccagaccatcacccgggacaacctgaccgactacatcaagaccaactacactgctgaccgcatggtcctggtcggtgctggtggtatcccccacgagcagctcgtgagactcgctgaggaacacttcggtggcctccccagcaagccccctacctccgctgccctggccctcactgccgagcagaagcgcattcccgagttcatcggttccgaggtccgtctccgtgacgacaccatcccctccgcccacatcgctctcgccgtcgagggtgttagctggaaggatgatgactacttcaccgctctggtcacccaggccatcgtcggtaactgggaccgtgccatgggccagtcgcccttcctcggcagcaagctcagctcccacgtcagccaccacaacctggctaacagcttcatgagcttctccaccagctacagcgacaccgggtaagttttgtttcctgttgatcatctatgtatattcttgatcaaaaacatgctgacttagtattagtctctggggtatctaccttgtcagcgagaacctcactcagctcgatgacctgatccacttcactctccgcgagtggtctcgtctgtgcaacaacgtcagctccgctgaggttgagcgtgccaaggcccagcttaaggcttccatcctcctgtctctcgatggcactaccgccgtcgctgaggatatcggccgccagattatcaccactggccgccgtctgagcgccgaggacattgagcgtactgtcagccagatcaccgagaaggacgtcatggacttcgctacccgtaagttgtgggatcaggatctcgccatgagcgctgtcggcagcatcgagggtatcctcgactaccagcgtatccgcgcagacatgtcccgcatgatctcgtaaagttgttctagagtatgatcgcgtgtgaagatagctgctgaatactccaggaaaactgggtttttggcggctttgatttgaatgtactatcaatcattgccttgggctgttagatcccaaattcgtgtgtgaaatagcaattaatggtttgccatagtagactatatagtttgctgcttttgcagcaagcataccaattatctcctttgtttgttctatttcttccagtgcactgtgaggttttttttctttctctgcgtagtatcaccaccatcgtagttgcctctatcgccgagtctctggaaatggtcgtcgttgcacccaagtcctcgtgtttcctacatctcacagttctttgcatttgagtttacccttcttcgcttactctatgccagcctggtcagaacttcaaaccacaagtacctatctggatactttactttgacgattggcatctctgctgactgggttcaattcttgagctcttgtaagttttctcgctatcttcacttggtcatcatttctcaccactgctgtttccttctaaccgacatcgatattttagtgactgaacctctctcatcatggcgcgattctctacccttccagccgagttgcgcgagctgatttgggagtttgcccttccagcgcgagtcgttgagattggagaaccatgcgacccagatatcttaccagaggaagacctcagacgagcatgggtccttaacagaaagtatccaaccattgctcatgtctgtttggaatcacgccgaatcgctctggccaaattcaagctccccaaaggtgttgctcttgcgcaggattgcatgacagatgatcgatggtggtggaagtcgaccgacattattcacttcaatgctccagagattgtcgcaccaacgcaaagatgcatactagaagacaacctattggacttgataagtgttcctattctatgcaaaaaggtctctatcagtgcagacatcgttcacccttttttgcgtttccgtactaggtccgagatcccacactcgatagtatgggaagtgctttcctcaatggagacatgcataatagccctacacacagtctgtatccgagccaccaacgaacaagctcaggagctaggcctctttggcaacggagacgagccagcacagttgattgacccgtttgacaaggcagctatcaggcgattcagacagctctggatggacacaaaacaggaggtctcttcagtcaagttttttgatacaatcgacaccggaagattcacttttcgagtcgaaaggtggctcgcagagatgtcagcggagtacatcgacttcaaatcgaccgatccaccgttcccaaccctaggaccgcgggctataagtgcagcacttcgtcgattcccagctcaaagacacaattccgacgcgaaacaatatcttgtcggatttcccaatctgcatctgaggatcatgtttcgactctgcccacctgcagtggtcgatccggtgattacataaccatcccgcatttgatcgggagattttttgaaggcgattttgtttgaagttcactttcctataactcttaccacatcataacaatgggaaaacgtggcggcaaaaaggtaatcttatctttcagacgttttatatgagacgtttgttgtactgactgtgtctcctttcttacagggtggtagaggccgcggcggtggcggcggcgcaggccgtacgcgcgctcaatggcaagatattaccagacagaacgagaggttcgaacgctactacaatgaacccgagttcattccggaggaggaaaaggaggccttctgggctaccatgcgcaaggatcttcccaacagcttccgtttcactggttctcgagggtaagtcaccactaggcttttttttgcgacgcgccccgggaggtttcaagtaatattgactgttgtttactttcattagacacgcgctggctgtgcagcagagtcttaaggaccgttacattcctgaaatcacttctatcaaatacgaggacgaattcgtcgagcccccgcgcccagtttcgtggtacccagatcagctcgcttggtccatgaccactcctaagaatgtcatccgccgattcgcaccttttgcttcgttccagaagttccttgtcgccgagaccgacgtcggaaatatcagtcgccaggaggttgttagcatgattcctcctctcctcatcgacgctagacctggaatgactgtattggatatgtgcgctgcgccgggcagcaagtctgcgcagctcatggagctgcttcatgcaggtgaggaagatgcgattgcgcaagttactgaacagatcaagaacggcactgctggacctgaacccatcggccccgaaggattgaacgacgatggccgaagcaccggtcttctgattgccaacgacagcgactacaagcgcgctcacatgcttatccaccagatgaagcgcctgagctcgcccaatctaatagtaaccaaccacgatgccacactgttcccatccatcaagctgcctcctctgcccactgccgatggcagcaaaccccaaaacagatatttgaagtttgaccgcatcctggcagatgttccttgctctggcgatggtaccgcacgcaagaacgtcggtgtctggaaggactggacccctggcaatgctctgggactttacagcacgcaatctcgaatcctggttcgcgccctgcaaatgctgaaggtcggtggacgggtcgtctactcaacctgcagtctgaaccccgtggaaaacgaggctgtcattgctactgcaattgaacgctgcggtggcgctgccaacgttaagatcattgattgcagccaggagctgcccggcctcaagagagcttcaggtctgcgaaactggaaagtgatggaccgagagggccgcatgtggaacaactggcaggagatcgaggagcaccgagaccaggagggcatcaatggtcttgccagacttgcagagggcatgttcgccccaacaggcgaagctgccaacctgccgcttgaccgatgcatgcgtgtctacccccaccagcaggatactggaggtttcttcatcacagttcttgagaagacctccgaaatcaaggccaagccggagagcaccaacgttatccccaagggttctattgcagctctcgccgcggaacttgattctaggaagaacgaggtaaatggacagcctctggagaaactcgagtcgctggatgaattagtcactcccgatgaagaggtagaggaagaactcgcaaagaatacctctgttgctgaggccgttcaccaactcccgtactctgctaccctcgatgcatccacccctgcttctcccgtgaaacgggctgcaggtgaccttgaagcagaaattcctgccaagaggagtagactagacgatggcacggaagtcatgctcggtgaccggcccgtccacgccccagcgcatggagtgagaactggccttgacactcctgataacagcacaccttctacctccgcgcctaccgcacagtctttcaagaagaagggtccccgtcaagaggagccgttcaagtaccttgatcctaatcacgaggagcttgttcctatctatgaattctacaagttgtcggatcgattcccccgtgaccgtttcatggtccgcaatgccgaaggtctcccaacccgcacagtttactacaccagtgccttgggacgggacattctcacctgcaatgaaggccatggcatgaagttcgtccactgcggtgtgaagatgttcgttaagcaggatgcacagcgtgagaacgtctgcagatggcgtgttcagaccgatggcctgaaaatcatcgagccgtggctgggccctgaacggtccgtcgttctgaccaaaagggagactctgcgtcgtctcctcgtggagatgttccccaaggtcaccgacgatggctggaagtctctgggcgagattggcgagcaagtgaaggatatccccatggggtgcagcattcttcgcgtccaagcgaacgtcggagaggatggtcttccgtgagttttcccctttcacattcctttgagtgatatttgcgtcttactaacatgaactatagtgaggccatggttctgccattgtggcgatccctctattctttgaaccttatgcttcccaaggaagagcgccgcgccatgttgctgcgtatcttcaatgactccacccctctgatcaacaccacacagaggcagggtgtcaagaccgagccgaccgagccgactgctgaggccgaggacattgcactgaaggaagagaatctcgaggttggacaggaagcgcaggacgaagtggatgatcgtgagacatacaccaaggatggcgatgaggaggatcgcttcaacaccaccgtgtaaatggttttatttttttcctcctaatgcggagatctctttgccgtatcaaaaagccaatatcatgaattccccttaggttcgttcacccttggtagtttcctaagtgagctgcatcattaggaatctcatacaacgtgcaccggctaaattcaggcctccacaacttccccgcaggaaaattgcttacttttaattccgagttgattaaaatctcctgccatttgatatgtggaaaaaatagacccccgcaatgcaacacggagcatccggggacccctcaatttgtctggggtaatgacgaaaggtctggcttgggaaaggggtcattgctatagtagtacagcaatcgcatattcccttgattcgtgtcagacatgtctcgagcctccgtgctatatgaatggcgcaacccctgcattgcaaggaaattggacctgagtccaagtgcttcctctcctctctgtccctagcacaccgcttcacccttgtgtgaattgtcacgaccgccatgaagctctcgtcttcttgggccattgcctgtctggcagcccaggccgctggtgctgctattacccattcgctaaatggctttagtatcaccgagcacccggatcccgttaagcgggatttgctccagaaatacgtatgttgggttggtccttggattaggatgattgtgttgacaagcaaattgtataggtcacttgggatgacaagtctctctttgtcaatggcgagagaatcatgctatttagtggtgaaatccacccatatcggtaagctggaaggcatcaatgagccctttcaagaaagaatcatgctaaccaagattcctgcagtctgcctgttccatctttgtggattgatgtgttccaaaaggttaaggctctaggatttaactgcgtttcattctatatcgactgggctctgctggaaggtaagccgggtcagtatactgctgatggaatatttgctctggagccattcttcgacgccgccaaagaggctggcatctatcttctggcccgtcctggtccctacatcaatgctgaagcatcgggtggtggtttcccgggatggcttcagcgcgtgaatggaactctacgaactagtgatgaggcctacctggaggcaacggacaagtatgtgatcctttcgaaacgtaagacttaaagcacggtgaatactgacatagataattagctacattgccaatgttgccgcaaccatcgcgaagggtcaaatcaccaatggaggacctgtcattctttaccaacccgagaacgagtacagtggcgcttgctgtggatacgacgggtttccagacggtgcctatatgcaatacgtggaggatcaggctcggaatgctggaattgtcgtgcctcttattagcaacgatgcctcagctggtggccacaatgcccctggaactggcgaaggggctgtggatatctatggccacgacagctaccctctcggctttgactgcgcaaacccttctacttggccagcgggtaatctgcccacttatttctataccacacacatggaccagagcccttcgaccccattctctctagttgaggtaagatatatggatatctcctgtgtggactatcaatctaactggagtttagtttcaaggtggtgcctttgatccctggggaggtgttgggttcacgaaatgtgctgctctcctgaaccatgagttcgagagagtgttttataagaacaatctcagcttccgagttgcattcctcaacctatacatggtatgttccggctctcatatcataatcaccattctaatctctcaccggtagatctttggtggtacgaattggggaaatctgggccaccccggtggatacacatcctatgattatggttctccgattactgaatctcgaaacatcacccgggagaagtacagcgagctgaagctgattggtaactttgtcaaagtctcaccggcctaccttctctcaacaccaggagacttgaccacttccaagtacacaacctcgtctgatatagccgtgactcctctgctaggagacgacaacacggcttcgtccttcttcatcgttcgacactccgactactcgagccaagggtccgtcgactataagctcaaggttcctactagtgccggtgaagtgaccattccccagcttggcgggagcctcactctcagcggccgtgattccaagattcatgtcgttaactatgatgtggcgggcaccaacatcctctactcctctgctgaggtgtttacctggacggggtctggtaagtccaagattcttgtcttgtacagcggccccggcgagcatcacgagctggctgtctcttcccagtcgaaggcttcggttattgaaggctcgtcgtcgaacatcaccattaagcaggtgggtaaggcggttgttatcggttgggacgtctcagtcactcgccgtattgtgcaagtgggtgatctgaagataattcttctgggtaagtgctttctccgataccgctctgcttcatcgcaactgactaaactactagatcggaactctgcctacaactactgggtccctcagctcccaaccaagggaacacgccctggttatagttcccaagaggcagccgcctcgtctctcatcgtcaaggctggttacctcgtgcggactgcttatctgcagggcaatgaccttcatctcactgctgatttcaacgccacgaccccgattgaggtaattggcgctccgaccaatgccaagaacctgattatcaacgggaagaaagcgcaggtcaagatcgacaagaacggaatctggtccagcagcgtcgtctataccgcaccgaagatcgagcttcctattctgaagaggctaaagtggaagtctattgatactctacccgagattcaagactcttacgatgattccacatgggttccagcaaacaaacccaccaaaaatagcgtccatgaactcaagactcctatctcgctactctcctctgactacggattccacaccggaaccctcctcttccggggccacttcgtcgcaaccggtaacgagaaaactttcttcgtgcagactcaagggggtagcgcattcggcagctcagtatggttgaacgagaaccacctaggatcatggggtggaatatccattgacagcgaccacaacagaacctacacactaccaactctaaagaagggcaagtcgtacgtgttcaccgtagtcgtggacaacatgggcctagacgaaaattggatcatcggcgaagaggaaatgaagaaccctcgcggtatcctgaactacgacctgtccggtcgctccgctagtgacatcagctggaagctgaccggaaacctgggtggcgaggactacctggacaaagtacgcggcccactcaacgagggaggcctatacgccgagcgccagggattccaccagacccagccgccgacccagagctggatatccgacagccccttcgacggcctgtctgcccctggaatcaagttttacagtgcaaacttcgatttgaacatcgagaagggctgggatgttcctctgtactttaacttcgggaacaccacctcctcgcccgcggcttaccgtgtccagctctatgtcaacgggtaccagtacgccaagtatgtgaacaatatcggtcctcagacgagcttccctgttcccgagggtattctcaactaccagggtaccaactatttggctttgagtctgtgggtgcttgagtcggatggtgctaagttggagagtctggacttgattcatactactcctgtgctgacggcgctgaaggttgagtcggtggatcagcctaagtataagaagcgtcaagcggcttattaggtatctaatgccaagtaagtaaataatgcagagtatacaatacaaagagtatgagccaaaaacaaaaagaaaccgcaatattattgttcgaggtcacgtgacttttatgtacagtacgctcccaacgatcattagtcccagctgtagatagtttctcttgtcctcttcacgcaatctgatattttccagagcatttacattcttcatgtagctctctcgtctctatatccgacatttatctacaatataatgaatagatcagactatcatccaaaatatctgaagtatcaaaagtactccgtagggcttccagggtcatctccacttctccgcagatcccagccaccccagcccagcctctgcccagcctccctcttctacttttggtgtgacatttttgtgcttttctaacatccttcaacattatacggagtattctcaataaaacccactcctctgacaccgcatatgccatcaaactccacaagcgcgcattagctcacaagctgacctcaaatcacccactcgctcgaatcaagatacccaagccctcgtgcctctcgaaatctacgcactctcacatttccaaaattaaagaccaaacgaccaggcatcatgtcgtccctccctctcgacaccttcgacctagacccgacaaaacccaacctcaacgcaagggacctgaacgccaaccttctccacaccgacacctccctccaaaaacgctacacaacaatctcgatcccatcaacatacggccgactacaaacaagcccggccgccggcacagtagtgggaatcatactaggaagcgtagcaggcttcgtactgctaatgtacgtactcttcctcgcggtgaacccggggggcattgcacggggcggcgtagccgcgccaacctcatcctcgatatcgatgtcgatgtcgatggacgaagaagaggtcgtggaggtgcgcaagcggcgcggctcatccgctggacggcgccgacgcgacatcatcgaggtcgaggaaagagagggcttccgcgatagttatcggcgtcgtccgacgtcgagacatgatcgtgtcgttgtagaggagtctctggctacttctactactggggaggatgttattgaggttgaggaagaggagtcttcggtgccttctgatatttcgccgcgtccgccgcggagatctaggaggagtgggattaggcatgttgatcctatggcttatggtgggggtagtgattatagtaaccatcggtgattcggggtgtgctctggaggtttgggatgcgatataccatttttgcttatattctatgttttatgtcttatgattgattcttcgaatgagttttagggtctccaaattatggctaacgcatgatgtcttcgagacgagccttggtgaaagacagaagatgacccacaatgatttagcggcccctgcagtatataaagaatgaatggcgttgtctatcaaattatattgctaataggataacaggatctacttgctgtccgaagtatcagtggccgtccacttgtacttggcccccgggtgatcgctgctcagcctgccatccgagaaatgaggtccaagataattctctcgtgttgttcgtccttcggccgcgactggatcccagaagacgcctcgcgatttgagctcggggatcagatacttgactacgtcctctagatctcccggcccgactgcatatgatatattaaagccgtcaacatcagtctcggaaatccacctctcgagtatatcagcaactgttttagcagagccgatagcacgggggtgtggtccaccaagtgcaagctcctgcgcaactcggtgctttgtccatttaatgccatcgctgccggggatcgtagccctccaactagagacgatactttgaatggccccgggtccactgaactcgaagttatcatcatctgcgtactttcccagatctgcgcctgtccagcctccaaatagtgcgagcgatccatccaggtcggcataagacaaatattcatcatacttctgttgggcacgctcatcggtttcgtcgacaatgataagaatgcctacgatcagcttcagcccgttcaaatcccggccctgttccaatgcgctccgtcgaacatcttggacattctttcggacagaatctatatgcattccaggaagaaacatagtttctgcgtgtttggtcgcaaatgccatacccgctttgctcgcccctgcctggaaaatgaagggagtccgctgcctggagggctcgacaagatgcggaccagcaaccttgaagtgtttcctatagctgatatcaataccgcataggaattcagttgaatttaagggactcacccttcgtggttgatacgccgaacccggtcagggtgcgtatatgtcttcaagtcgcggtcgagaataacggcgtcgtcccgccaagacccttcaaggagcttgtagacaacctcgagaaactcgtctgcgatctggtatcgctcatcatggctgatttgctgttccatacccaggttttttgctgcactctcgagatagcttgtaacaacattccacgctacacggccgttggtcaggtggtccagggttgagtatcgccgggcaagcaagaacggcgattcataggtagtagatgctgtgatgccaaacgagagcgacttggtgacagccgccatagcagcaatgggggcgctaggttgcgataagtgaattggttcatagaagtagcaaaaagttttaggaacctacgatgggtcagagattggaaattgggcagcacctggaagcacctctcggatgtttcccggaccattatagacatcgtaaatgcccagcatatctgcgaggaaaagcccatggaaattgccgtcgaggattttcgccaactcgatccagtacgcgatttccttgtaccggtgagtttggtttttcgggtgcctccatagccctatattgaaagtgttggccatttgaagagttgggctagtatagtacttttaattacctggagcgacatgagtcgggctgctcatggaaaaggcgttgaggatccatttcttgggttctgaggccatcttcggcgtggaattggatgaattgatgcaggagctgttagtacgcactgtcgaacgccctgaacatttaactttattggcccttgctgtgttaaataggtccttatcctgatagaaatggctgctgtgacgtgattcagccaagttatgacactactatgggggcattagggcttgacattgcggaatggcacatactatctaattaatgttagattcgtttctcaaagaggatttgacagactaaatccatggatagataccagatctgattgctcatgtacgggtatctggcacaagttgctgtgacgtgatttggctaagttatggctctacgatggggaaatcagggtctgatgttgcgagatttcaccggcacgcggtgtacaccagcaagctgtgcactcaaaatacatagtagccgtcctactgcctcaataatacctttcctagaaaacataagaattaggtatcttttatatagcacgctcatataaaaggtacatgcacgtagacctcattctctcaatcctccgactagtcagaggaagaacacggatattaaaataatgaaggctggtctaattaatttgctagaaaatattaatatatcccacgtggagacttgaagaccatatttggaaacactatataagagatgtatgtacctagagatagttacttaatgcactgatactgaacaaaatagacttcttttacactgtacataccaatagactttccctaagtatgcccaggaccgagaagtccctataatgcataatgtctgtatacccgtatggccaagccttatggggatgccatgtggaaatttctgctttgtgggacccctaaactgtacctgggaaagatatggggacgacggtagggcggctaaatgctacatccatacctcaacgaccatgttttacctctcgaggtccttatttgtcgatggtcgtcgataaggtttatttgcactatatatttcaatcttgaagaaagaagaagactatttcatcaatctaaggattaccgacacttacattattactaaaagctagaaatgtacatagcgcaatcgcaaagccatatatgttttcaaaaactcactggagaggcgagatatcacttataagtataatgctataaggagaattctatatgcaccaccgtcactaagatataaagatatcatttatcgcatttactatgtgcatcggactgcagctcgcttatgtgcgcagatcgacgtcaaagactggatttgattgcttgtgcatctggcgcaagattggtcgttgtgacgtgatccagccaaggtatggcactatgataagggaattaggcgttggcattatggattggcacatacctaactagggcttttggagtcgattccccaaaagattcgctgtactaaatactggatctgattcctcatgtaggattggtagatttgatactccactatgactcttgtgccttcaggtatgagctcttagagactatatatgacgaaatcgcgcggaatttcgtatcggagatagctttcagcacattggaaccactcagaattctcaaatcattgatactaagcggaacgatcaaccgagtgaggaaagcgtctaaccgatggaagaggccgaggctagagctttgcgccatagatctagtatgaaaggttttcaggtgctggcggggacataaagcaggtaaaagtctcggtagctgcacgtctaggaaagtgcaattcttcccgtgcatgatttttcgcctgtcagatttgacaccatgagtgagaccgcaagtccagtgccgcccctatcccagggagtcgggtatggagttgtcattggattgggagtcgctttcgctataggtaattcgctcagccctacaagcagcctgtgaattgccagtaacattgttcccgccaggcatggtattcaccacaagagcattgaagaaagtgttcggtgaagacagtaacacaacagagacgtaaggaaccaggcacctagttgtgaaatccagctaactccagtagcttcatggttgcaaaccgaagcgtcggaacaggattgactgcgtccgcggttatctcgtcctggaccttcacttccgctcttctaggcgcaccatacctcacctactggcacggaattgctctgccaatctggtgggccaacggacagagtgttatgatctgctgctttgcctacatggcaatccaggccaagctcaaggcgccaaatgcgcacaccctcctcgagctcatacgcgtacgctatggtcgtgctgcacatatcatatggatcataatggctcttctcaacaacatcttcaatttcacgtccatgctggtaggagcatcaactgcagtttccgccctgactggcatgaacgtatacgcctgcacatacctgttgccgctaggtgtcgtcgtgtatacatactggggtggactgagggctacatttttgacagactatatccacacattcatcatcatgattatcctggtgtggttcaccctcaaagttcttaccgtcgctgaaatcggttcactcactgcattctacgatctggtcaagtctcttccgcaggaagggacagtcgccggcaaccatgcgggatcatatctatcaatgaacagcaacgagtctttgttcttcggcattatccatatcgtcaccaacttcggaattgtattcatggatacgggcttctggcagaagggattctctgcagatattgcagccgcagttcccggatatatcatcggtggaaatgcctacttcgcgatcccgttcacttttggcacggttgttggtcttggtatgtgtcctcataattaacccgtgtcaatatctaacctccctttaggagccctcgtcttggaacagacccccatatggccgacctaccctcgcagaatgacccaggctgaggtctctggggggttggtactgccctatacggcgcaggcagttgctggaaagggaggtgccgcggcaattctgttgattctgtttatggcgtgcaccagtgtcgcatccgctcagctcattgccgtcagctcaattgtctcatttgacatttacgggtcgtacttcaataaaaaccccacggaccagcagttgatccgatggtcgcatgtgggcgtcgtcggatgcgcactgttcatttcgacctttgctaccgtgctccataagggtggagtcgacctcaactggactatatatatgattggcatcgttatttggtatttctcaattaccccaagagaactatattctcactaacagaccttatagccccggaacctttccaacatgctttgcgcttctctggaagaaacaatcccgcgtcgccgccattgtggcgcccatcgtgggtatggcttctggatttgccatctggttcgcgactgcctataagctgtatggggagatcagtatcattacgacgggcgagactctgccttgcatgtatgcatgtctcacgtcgatgtttgtcccgcttccagtatcagtggtattgtcttacctgcggccctcagactttgactgggacgagttcctcaaaatcgaaagaatcagcgataaaagtgattcacagccgcaatttgaccgtgagagttatttcagtccggaacgagtgaagtatatgaagcgcatgtcaaaaattgccgccatctgggccgtggcaacattcatgggccagatcgttctctggcctctgcccatgtacggcgcaaagacagtgatgtccaaggggctgtttgtggcctggttggttgtgggcctgatctggctgttcatcacgctgcttgttgccaacttttatcctcttgtcgacggtggattgcagcagatctggcaggtcatcgctgtagttagaaagaccactaaagatgactcgtccgaggtcattgaggtggatgtcatcccggagacgaagtcgtaactcacatagaatacgggctggaactggttgggccctaatcctcatcattagcacagatcactcgatttatatctacgacatggtcataagcaacgaaattaactgctaccaactggcaaatgttaaacaaaatttattacaggaatcggaagcttctattaaaatataacaaacgctttagctatgttagtaaatacatctcttaccggacaataggctagatatataatgtatctggtaaagtacacttcgacctgtattgctcaatactattgtaaaaagaaaaaaaatgccaacgatgtaactagttgttagttaactagagcctatgctatgacaaactcaagttggtcgatccactccttgaaggaaattgtgccgtgtctttcgttgtaacacctggaagaataaagaagacgaattttttgtcgatcgtggaaagggtcgacgaccgttatttttgctcgttggtaagccatggctctgatgttcatgttttgtaacctagagtgatcacgtagatatgcaaccacctctcgacagatccgcagactttcgtctttatgctctctttctagaggtttcgagatcctgaaatcacttgtccgggtgaggctgtcgagagtcaaatgtttcagggtgtgtagggctgtttgtagcatatgcctgaaggatacagtggttatgacttagctcagtgagaggaccgatagacgagaaaacttgaactgttgtgagatccagtcgaggtgtgcgtccgtcaggtcaaggccggctttctgtcggcagaacaaagagggatttatacctgcgagatgcatggtgagatccagactctctaagctcggggctgcctgaacaaagagcggcagcagtctcttcttctctctttcggggagatttttcctttcttgccagaccactgattcctgtagcaggaacgccacttcttctttgtcttcgcgtaagtgttgccgctcactatcttgggtatgggctgaggaaatgcgaacagacaagtgctgcagccgttgaagaattggcgtcaaggcttcttcttccgctggtgtgaggtctagttcatcatccaccatcatcccaccagaagtttcaagcctttcgatccgagtgtgggttgtaccgagggtggctaacagtgtggaaaaaacataggactgaaaaagactcccccgaaaggaactactacgagcacacttgtcagcaccccgggttagggagctaggataaaccagattgaagccaagttgtgtccgcaaacttcctatccctctcatgatcctgggaaatctcttagtttcgtcctcctgatgaccgtgatagtttctcagtcctgccatacgcagattggaaaaagaaggcaggcagctctctagtgcatctcgaaggggcgtttttgtggtgcttccctctagagatgacaaaagaatgttgaagtggtcgactactgcatccttgtagatgagataacgactttctaacggtacgtcacacattaaggcaagcagattattctaatattgttggccgccttaccggctgccttgcaggaagaaggaggggggaatcgtgaaggaaggaggagagttggagagaagtcgtagccgttgtccctgaagttccagagtttcctacgattgaatgagtcgcttaatatcctcaagtgcccacgtgtagtccgcacaaaaaatggtcggtacaatccacattgtctagcctcaagaatcagtttatattcgacgcattgcatggcaagaggtatgaatacacataccgtaacatatctgctgaagatttcgtggccagccacgtaccttaacgctcgtagaccatcgcttgtaagtgtaatgtagatttaaccaaagatcaaattagcaaggtagtggtaggttcccagtgcaaatgcactgcaacccagtcgtagtgcacaaacgtccttgatcttcagttttcgacatatttaggcccataactctggaggtagagaattcatagaaatttccatcatttggggaatctgacgttgaagataaaggcaaaaaaaagaatagtactgagaagttgggaaactactggtatgcgttttgggcgcctggcaggattataacgaaaaacgaatacctgtttctacgaacaggtaccggcgcaccaattaatccgccatactaataacgaatttttctcgttatgaactttgttgatcattcatcccatacaaaattcgttataactgttacgatcctatatatagtgagtgtcctgtgtcctagtgtatagcggccgacagtcggatgcctagttttaatggttttatagcctaatgaggactagctcttactagttttagactggcaggaaattaaaatgcctgaattactatgacagatctcctagtaagcagagtactaaaggccttccgatagctacagtacagtactacttcgtagactggcaaatgatttagccaaactgatctatatggcgttgtggtctgtgagtctgaatctttcctcaatgccggttatgccgtcaccgagtgtgccggttgaccatagcaaaaactaagcatctgttctattttacgtctgacacataatcccatttgcataaaggtgttggtaggactgtgagagtaccctgcagagaaacatgcatataagactttggttccaccttgtttaggtatttcaagactgcaagaagcgacatatgactcttacacggacaattcccttgtcgtcagtgctaatttgtcaaaaaatgccctccatcatgataagccatcttcatcttccgcaaacaaatttctaaattgttctaatctccaaaatggaaactcgccttccaaggctgtgcagatatcccattctaaagattgaatagtactgatcactcaacagcatcccgattgaagatacaacatgataaatcttcggctagtaagccatctgttctccaaataacctagctcttcttaaccaaataaagatgccatgcggccttccaggagacgtaaagctcgccatcaaagccgttcatcaaacatacaaatccggcatatggtcgcgtgcgagtcgtatctacccgatctataaactttcttttacggttatcttcgaaatttccttatatatagcgactgaaaatgaaaatgaagaattaggtagaacatcataaaccagctcgagggaaaagtaaacaaaaagtagtgtaaaaaatcattgtagtacaattgaggcccaaaccccaggaccaggacccaagaacgccatgtcctgttgtgcgccagcgataagtaataagagtcaaggatatatacaagggagcaaaaaaacgatcacaccctgagaccaatttccaacccaggattcacaaagcaccagttcccgagtcaaatgccaatcccaggaaactccaatatctatctctcgatggttctctcaggagtatcgtgtttgcgcgactggaaaagacactccaacaccagccaaaaaccaaagcgtagtcacgtattaaaaaacaaggccaaaatgaggcctagaacaacatatccaagcagcagcagcaagccattgcagccatgatacccgcgcaaatgccacctgcaccaccgccggagttcccgcggtcattggcatagtaaccctgtggcggctgttgagggtactgctgcggcgggtaatacatcggctgctggccttgggcgtaatagccctgcgggttttgctgtggctgggcatagccttgctggggtgggtagtagccctgctgtggttgctggccgccgccgtagtagtcgttcgcagcgccggggctttgatgcggttgttggtagtaggggcctgagtcgtggacctgggcagggtaggaaggtggcgggcttgtctagaagggatttatatttagcatttgtgttttaagcaggcttgcgattgattgttcttgtacttacgggtttgttgtaagacatggctgaagccgaatgtggagttcccgggatgtcagacttagtgcggatttggggagattgcgcagtagatgtggatttgggggctgtttctctgtcggattggttcggtgtatactcgaaacccgcgaacagtaaggaaagagtggtgatagaaataaagagtaggaagtgccggaatcgaggaagagttgcagtggcgcagttcggggattagtcaaccgatttccagggttttccacgttccaagactttatacttacgcggcctcattttcgtaccccgtggatatacctaccagaacaataatgcataaatctattttttgggtgttttcctttataatttttagttgatatgatagaaatgattagttacaaaatatggattgcaggaaacagagatgtctttttatagtcttatatatagccagaaggatacatagtaattggctatagatgtcggcaaaatacagacgactttgccatatatagtatatggaatatcgcgtagacagtagcctatatgaatgtgagcagacattaagcatgatctacaacttccttctcacctgaactcggaagacagccattcatagattggattcatctagagatacaaagacacgggccattatgttaaatcacaggcaaacaccccatcgaaatcccctgaagcaggagaaagttcgcgcctatacgccatgctgcccataatacaaaggggagaccaaaaactttttttgtgtttgttgaatgtgagtcaatgagtaaaaaaagtaactcccaggtgtccacttctgtctggcatcggctgctctctcgactgccagttgggtatttcctgcagagttgcgagtatggaaaaaggtcatatcggagacagtaagtggacctgatgcgattcgaatttgcgaggttgaggttcacaggaaccggggtttggttttgcaaaatccccaaatgaaagaaaagagaaagaagagaaagatctagcgtgagctcatgctgaagaggcgcatatcaatcctgtcccatttgcagcaaccttgttttgcagcttaaatgacccagcggtaactggcatagcgacctgcagtctcagacttgcgaatgatcttaacgacctggccacggcgcaacccaagatagcgggcaacaggatccgagatctgtatgcggggcaattgagactccttcagacggtagcgctcgagaagcttgcccttctcctcggggctaagcaggacgtgcttggggactagctcgtggcgggtgatgttgacgagcagatcttgttcctggaagtgttcgcagatgcggccggggacgccggaaagcaggcgcacggcagagggtgagataggcgtctgcgtgatgaagataccagtgtggaagttgttctcatcgacaaggtggttgaaggcgcgcacttgcttggttccgacacctgaggagtcggggcagaagtcgacgtaaattgtgccgcagtctggctgggggtttgggtttgctttgctgggaagtggtgtgtacttcatcttcatggtatcggtggggcgggcttggattttcatcttggtgcgactattgttgcggaactattagtgatatgtgccttttcaatgacgtgtgccggcattgactagctcaaatttccactatctcaagacaatggggcggtggacgcagggattcacgtactcggggtagcccagagggtcagcatattttgcgcggaagtcttctagcgggagtaccagctcgttatcagatacttcgtagccctggtgtgtcgccgatggttagccttgggtaaacgggcattataggagagacactgagaagtcagggactcgatctggggtacctacccggtcagcgagcagttcatagactgttctaaatgtgcgccagagccgagtcatctcgcgctcggcttccatggagtgtgccgaatccccatccatgatggagtgagaagttgacgactaggagagaaaaggtaatcaagtactatctcgcctggagggtttaaaaagaaaaaatttggatagaaagagctccggtggagagataaaggtgaagtcgaaaaatcggcgggaactttctgccagcgacgcttaagcggagaaaccgaccgaaccattttaattattccaagtttccccttttcagtttcgctttagtctgttggtctatataatcccttcaggatcctcggaaggcaatttgtctcttccttctctctgtctctctttttacattcaattcgtcgcaatggctgccactgatgcggagcgggttaagcccaccaagcccgacgaggccgcctacaagaccagtctcgctgaggccgagaaggagcacactgctgctcaggagaaattggtatggaagcctgtttctggaattgtcacttgagctctcatctgactctgggtcgcgggggtgattccgacccactattgttgattgtcctcgtgtccattatttacttgcataccatctcctcgggccaatgactgatatgcgcaatagaaccaaatcaaggccaagttggataatgccaagcccagcaaccaggattcgcccatcgtgaagaagcagcaggagctgcgcgccgaactctcagccattcgtcagaagcagtcgggcttcaagtccagccggtcctccatccaggagaagctcaacgccttggacgccaatctcaaggcccgcattactgagcagaacaactctcgcgggcggctctcattcaagagcgtcgatgagatcgacaaggagattgcccgccttgagaagcaggtcgactctggtaccctccgcctggtggatgagcgcaaggctctcaccgaggtctccaacttgcgcaagcagcgcaagagcttcgccggattggacgaggcgcagaagggcatcaacgatatcaagacacagatctccgaactgcgcaagaccctcgacaaccccgaggccaaggccctgagcgacaagtacaacgagatccagaaggagctcgataccatcaaggccgagcaggattccgttttcaagaacctgaacgctttgcgcgatgagcgcaccaagctgcgcaacgagcaacaggaaaagtacactgctattcgcactatcaaggatacttacttcaaggcccgccgtgcctacaaggagtacgaggacgaggcctggcgtatacgccgtgagcgtcagaaggctgagcacgaggcctttgcgcgcgagaagcgcaagaagatcgccgataagaagttggaggaggcctcgcagcttgcctacaccgacgagatcctcactgcacagggtctgatccgtcacttcgatcccgcttatgatttcaccaccctgggtctggatgagaagaaggatgagggcagcaatttccgtgccggagttggccgcactgttgaggccgccgagatcaagggaatgaaggttgtgcgcaaggacgacgaggaggactactttatcggttccggtggtaagaagggcaagaagggcggcaagaagggtggtgccgccgccagtgctgagaacaccaagttcaacatgaatgttggtatcattgaggatttcgccaaggtcaagatcgacccccctatgaaccagtcggatgtcgccgcctccgtggagaagctggctgctaagatcaccgagtggaagaagaaccaggctagcaagacagaagaggtaattattatttccaaggttgtcggttgtgagcagttgctaattaccccgcagaacatcaaaaaggcccaggaagagattacccgcctggaagaggaggagactaaggccaacgcccctcagaccaatggccgggccaccgacgctgccaagaagcccgcccaagacaacatcactccatcagcggaggctgagctggctcaggagaaggatgccgtggccgacgttgaggaggagctcaagaaggctgcgatcgaggaaaaggcatagattcgaggaggaaattatccgtacatgctcaatgcgtcaacttatacatgaagtctagcgtttgtctagcattctcactgcgctttttctttatttttattttttcgtttggctcttgcatatgcattatatctacgattcataagtggacagctggttgtttccaaaaattcatataatcgaagccttttatttcatctagcctaggagataagcccagtcatactctgatcagagttgtacattatcatgtgatatgatattgaattaacttccaaatacttgtcagtcgtatctgtcgtgaatgtatgtaaatgtaggtagtatgtagttatgtatgggtacattattcgcaagactccaaagagaaagagtgccagttatgtccaagccgttggaagtatccaacggatgtcgggagataacaccaacaccaacgctaataatcgcatgagggggaataaaaagagaacaggaagcagtaagcagaaggtatagagggggtacgagatgtgtacatagtctcccaaaccccaaaagaagagactccagtcaaatattgcatgtacaggagacaacaagcctcagccgaaaatgtccagaaaaagaaaaaaagaaaaggaaaacagccgtcacatcatgtcacatcacatcacatcaatattggaagtagttaccgatcatttcgcgataacaaccccccaacatcatgaagctcgacatcagtgtcaagcgtggaatccgaagaaccgggcatcgcaaccgaccgattcccaaaagccgaggcgggaaacggcaggtccgccggcccaggaagcggcgagcgatgcccgaagatagcacgcgacggactgaagatccccaaatcctctaaaaaggcacggctgccgccgcctcgccggcgctgcacaggctccacgggcgaggacaagcacgtctgggcgcgcacatgctccggcccagactccggcagggctcttgtcagcaaaccgccgacatcggagaacgacacgcggcgcggcgtgtctgagggcacgctttggcgcggggactggtttgtgcgcaggtactcgtgcggcgagactttgcgctcgagactgtctgttgtcgaggcgtggtcgtcgtccgagcgacgggttgtcgtgaacgaccatgctggatcgagggcgccggttcgtgcggctggtggggtgatgggcgctggtctggggagacgagttgtgtctggggtgtcggggattgtgtagatgtctgggtctagacggatgcagaggccggttgcgagctcggagtctgagccccattggttttgcatgacggtgtttctgcggaggaaggatttgtccatgctttctgagacggaggctgagccttgggcgcgcttgtatttgagtttcttgacgccgcggtcgcggacgaaggagcctatgacgaggacgttggcgactgctgttgcggcgagaatttcgagggaggcgagaagggaacggtatgattgggcgccgtcattgtcaattacagaagagacgcggtaggaggttacggcgaccaatatcagagataggcagaataggctggatagggtgagtctgcgctttagaggcatttgcgccatgaggattattgggattgggatagccacgaggaggaggtcggtcagcacgtcgcaggaacccattgttattaggttcacgtagccggcgcggcaggttgggcccgggtctgggacgacctgcccgtagtgnnnnnnnnnnnnnnnnnnnnnnnnnnnnnnnnnnnnnnnnnnnnnnnnnnnnnnnnnnnnnnnnnnnnnnnnnnnnnnnnnnnnnnnnnnnnnnnnnnnnnnnnnnnnnnnnnnnnnnnnnnnnnnnnnnnnnnnnnnnnnnnnnnnnnnnnnnnnnnnnnnnnnnnnnnnnnnnnnnnnnnnnnnnnnnnnagccggcgcggcgggttgggcccggatctgggacgccctgccagtagtggtagaaaggctggcattcggccagggttgcgatgaccacggctattagggttgagacaaggaagtaggagatgaagcggaggaagaaagttgtcgatcggcgccaggcaagccctgtgactcgctttagaaattcgcacatggtcactttggtcgtccagatgctatagtcgtggttgtgagtcattttgaactaatccaaggtgaagacaagggtgtcttacaagacggcgtagaagatacgcgcagcaagaaccagcttactgcccagctctcgattcgcgatctccttctctgtcaagccgatggtggtggtattgttggtccccaagatgagaacgaaatgcacgaggaccatgcgaatcagcaagggaatgacgctgatcatcatgaccttgtcctcggtgaaaaagcgctcgacgcgaatataacgaccacataggcgcacgacgatgatcaccaaggagaatatggtagcccaccagctcatcatgagcgtcggattgatctcagatctgctctgtatggccggcagattctcggaataaatgccacgcgcgactagcgacatggcgctggaggccatggaggccatgatgcgaaaacagcagtctcgcagaaagcgattcagaatgtgcttttacattgctcgcacgtgggaaagtgtggggatgttttagctggttatggggcgaattgcggagactagggatggaaagtgacgatcttgagatggaagagagatgttctcaggtacgatataacggtcgagggagataggggcaattaataataagtcgccaaaccttgtcgactcaaggccaagtggaagaggggaaatatcaaggatgacaagataagcgaagcctccgtataaacagccagtgaggttcgactggctaatctgggagattcatactttttcaacgacctgatagatctgggtgaatacatcgaacaaagaatagaataatcctctttagcatgacattgttgaccctggcatacaatattcctccaatgagggcgatctgctatagttacggtgtacacgtggacgattaccactttgatagatgcagtcctacgttgcatcgacagggtataaaaggcacaatgtccccgataagcgaggagctctggagagttcgccctggacttctgtattccacggaatctcacgattatctacctccggccctgctccgtcggggaatgttatctcccaaaaccttacctctaaattaatcgcgcaaccctcatccaaccacagcggacgccgaatcttcccgctttgcttcatcgcgaaccgactcgattcccgacccagcacgcagcccacccaatacggtccgcaactcctgtaggaacttggtaacctccgcctccgtaccgacggtgatacggagacagccctcacacccaagctctttcccacggaagcggaccactacaccacgcttctccgccatagcctcgtaagccgcaagcgcagtcacgttactcggtcggccctcggcgtccaggatctccacgagcaagaagttcgcatcgctaccgccaaggaattgccccacaccggggatcgccggtagttcgcggagcaaacgatcgcgttgagcgatgatctgcgagcggaaactgtgcatcactgccatatttggccctgtgagtgccgcggaggcgagcgcgcttgtcgggctggagatgttataaggcgctttgaggctgttgagcagacgtgcgacctccgggctggcgtaggccacgccgaggcggataccagccagaccgaatgccttgctgagagtctgcatgacgactaggttgggccattcggtcacccactctgccaagctggagccttcgggcgcaaagtcaatgtatgcctcgtcgaccaccacgataccattccaggtcgggtgttcgagtaccttacggatgtcctctttgcggatcaggttcgcggtcggattgcccggcgagcagatgtaggccagcttgattgatgggtcggctgatagggcctcgttgactttatcggcttgtagatggaacccgtttgtagcatctagtggtaccttgacgatctcgaggtcgtttacctgtgcgctaacgctgtacattccgtaggtcgggggacatgtgaggatcttgtctttgccgggaacgcagaagcagcgtagtagtgcgtcaattgcttcgtctgagccaacgccgcagaacatgtgctcggggaggagggtcttcggggtgtggtggtgggtattgcggaggttgcagaagagctgcttcaactcaatctggtgactggtgacacatattgttagccaaattggtctgaatgagattcgacagtagaatttcactcacggatcggggtaacggttcaggccgagaaagtcaatctccggattgaaggctcccgtggcattgccagcctgggaggactgcaattctcccttgctgctcagggcaagaccaggcccgaaggcattctcgttggcgtcgaggaggacgttcgtcccatcatctttgtagtcactgactcatttagctcaccgataccggtaatttggaaagggcagcatactctctggcgcatcggtagggctgcaatgccaggatattaggccgggcgcatgtggccaaattaaacggagattttgaagccattgtggtgaccttgggaggagtgtgagacgttgagcaaaagttggtggggtgctcaggtgggtggttttatcggaactctatgagtcaaatgccgatctatgcgtgtatatcttccaaggttcttatgagattccacatttacatatctttacaagtccaatggtattacagacattacggttctactacaatgtcttctgaatatattttcactgctgagaacacaacgcggggtaggtgcttttgttggtttcagcatgtttgggggaaaagatattcatatgaactatatctttaattctttttaggtgacaagaggtggtcagtcagtgaaacagacattggtcaatgcccttcgagatcctacaggataggacatggtatgagaactcggtataacaacagtgcatgtaaacaattaccaagctactctttctctcagcagcaaggctctgaagcaagaagcaagcagcgttaggcgcatgaagatacaatcaagcaataagtattgtcgttctgccattcaagtctttctgaaaattcgcttccacaaccgcttattaccaccctggccgggctgaggttggccctgcgttttcacctggggttttcccaccactggcagtaaaaagaaagcctccaccatctggatgacacaagccgggttattgtcatactgtttctttttgaaatcctcgacaaagccttgtctctctctcgcagtatagttgaagcctcgttcccttgaacaacaatcacacgttggcgtacagtgtccaatgcctttgtttctttctgttctttcgtggcgatcatgacagcatccacagtctcgactacaacagccacctctcttcatgcaattttcgactagttctttccggagataccaagttgtatcttttcgtaggtatcatacgaccgtttgatgggccaataggaagcattatttcggcaaggtaaagcttgtactcggcctcgctatattgccgtagtagaattgtaagctcctgattataatattgtgctgctttatctccatatttgtcggctgctatcttttctataacccgaactttgcgctttagggatttttcttgttggacgatttctcggagacgatattcggctattattatatccacaaagacggcgatattgaaagatcgggtgccataatggagtatgcgtagttgttcttttccatgagctggggcttttgcgtagtgtgcgtcaggcaccaaccttgtctcttcaaacatattgcgagcaccctgcctgatcatgctgacagtttcgaaaagtcaaggagtaaggagaagaagactggaaaagaaagagaatatggcatataaacggacgcccagatgaatacatagtatccggatgacaagagccgctcccaaatcgggtctagcccaaagcctaatcggtacatacctcggaacatccatcaggtaggcgagcagcttccaacgctatagaggggaaatctggaaagaagacctccacaaaaatatgagaaggccgcataagtgaacgatcatgtccgattctttcagatctttaatgatcaatctatgattacataagcatgatctccggccccggggccgaggtcggccctgcctccaagataggcaattttgagacctcaactgggtgaaggaagtcaaaaaaacaaatgtgctcaagaaatcaagcgtccaatttttttatctcaccttgctccttttagcacatttataccaacgcctacaagctagacacccaattgcttattccgcacatttccgattttatcagctcaaatcaaaattcctctcactgggttttatgcaggtcctttgatattggtggctctagcgttcgtaatgaacgaaatggccctaaaaggaccgtcaattttaccggtggatatcatggaatctcaattgtccacgattgacctcctaatggcgatgttcccgtccccgggcgagctggaaatccccgaatccacaacgcagtgtgttgagaaactccgcgactggtgcgagaatccgaccttcacacctcccagaattccctcaagcctctctctcaccgtctgcctaccaattgcagacggagacagaacaatacaagtcaacatttccgtgccactgcaatgtgataatccagagacactggaccaatcaccgtcattgggctattcacttcgacaaccagaatggatgtccagagccgaagttgctggacttactgcctcaataccgcaaggcgatgatgctctagaggcattcgaatatatccaggcagaagccagccgctttcttgaaagcaagcagtctcagaccgtggccccagaagacacatacagggggccaactgtccgagtctggttctattttccatccctgtcaacccgtaaaaagagggatgacatggtcaacctcgcgccgggatatgctctgacaggctttgtgctggcgggcaagccgggcgtattgtgtcttgagggtgcttcgcctgatatcgactcttatatgagtttcatcaagacacattcctggggtgatatccctagctatcagaaaaaagtcagtgagaggtttcgagagacagaaggtgtccagagagtgttttcggggatggaggaaattacggactcgctcggagagcgaggtggtcagcgggccaatcggggtgatatgcaagcactggaggcgtggttggggagtagaggactacaagaagcatttgaaaaagtcatattctaatatattccattgaacaggtctgtttcaataatctcaaccgagatttcatcattactgtggcgtagtagcagctggttgatatcttttgcagcttgataccacaattttgtctggcgttggtttggtattctgagagagaaaggaagtgcaggtgggggagtaaggtcatacctacctgaggcaaacaacggtctcaaaaataaagaatgagaggatgaagaatagcaggagcacaaatcagcattgataaagtacaaccagtttgaggagcggtctcatacttacctaattgggagagagatacctagaccataataaaaaccaaggttccgggccatattcggtcattcattgttcattgtccattgtttaccctaaacatttgtaacccaccgaacgatttctcaactcatcaactaacatccatttgtccattttgcttttaatataccctcgtctaatcgaaatgccccctgacttctccacattgaggcatcgtgagcgccaacgggccgcagcctacttacaggctcgcagtgaagtcattgccgctatcgacgcgatttataagcgggtcgaaatctacagctctgcccaaatcaaccccacctcctacaagtctcttggtattgattaccgattgcttgagctagatgatgatgggaaacatcttcagcccccaaactccgatctctccaccccgattttcttcgagcctcgaggtgcaacgtgggtggcccctgttcgtattactgatgtcgaatgtgagggcgatctaagggcaatcaccgacggatgggagaacgtcaaagacaacccactagtccagagctttcatgcccaggtctggtatgtctatttgggtttggagcggatgtttttccagttccgccgagagttctaccctgaaggagatagcagagttccacctaaccttaggcaaatatccaaatggctgaagaggtaagaaatctaccgcctttgcgatacgattgggatactaactcacgttcgctttatagtggaactattgtaccatctgtttttgccgaaagattttactcggctatctggggatcaatgcgatgggcaccggcatctgcctttgtgccgaagaaactgttatatcctggaaaaccgcatactctaatcattattttgattcaagaagaacccagcgaagagctatctcgcgcagaaatgatgacccttaccgcagccatgatcacgcgtcttgagggagaggaatgtttagaatataacactattcctgtgagtatggatttaagatctatatacttatctttcatgcaagctaatatatgttaacaacataggttatggctatcacgatttttggaagaatgaaagctcgagtactcgaagcccattctagccagcaagagctagtcgtcaagaagacccagcttcttgatttctcgacaaaccaagtcgctaacaagagcatgaatattctgcttggatttatggctggtgacctggtcggagatcctagaggacccacagttcctacggatatttcaaaggtttgtgctccagatataatcgacttgggaagcacgctgacaatgaagtagacttcacgaacagccgagaaggtaaacaccgcgaaaggaggaaccattcggaagatgttccgcaaaatgcgcccacgagtcgtggcaggtacagagccagagccatcggagggagctacccagtaaccaaacttccaatggagccttttattacgctgcaacggtgacaggggattaatatctacatctggtcctaagtcacgcggcaagaaccaaagacaccttggctattcctaaactcagtcgctagttcacatatcaataagtctttacttggaattgaattgatttgctcaaagtctcttacaccatctgtaagaataagatagaaagtgaagaatataatcacgacagttggtttttatttcgcgaagtagacgacaagcaaggctgagtggcttcaggctactggcatgacaatgaggatggctgcgagaacaaccctaccgaactcatgcatatcattgactgaccctgtgtcgaagggaccgaatgttctcatgacgaggaatgcgtcagtgttttgtccattgctcaaacactcttcgtatcctttatcgaagggcacgaacgtgatgaaaagctcatgtcggtcttgtgaaatcaataggaagctagaagataggcgtcattggttattcaagctctttgaagccacttattggacgtcgaatatccaaagactgttagacttactgctcgttgaagtgggccatctgcccgtggcagctcatcgaccaccccgcgacttcacatgcctcttgcgtaaggatagcgtcggtgtttacttggcgcattctcctctttacttctacgatggcgaagataccaatcgtattctttgaccgtaatgcgccatccgtatacgcggtagacttggtctggtggaattgactcccgaagtgcacgcggttaatcacccactctagctttgagtggacaagttgagagatactttgaagaaggatgatggcggcggcattcggtattgcctcgtcctcggcatcaggaagttggcccatttgcatatcgtcacgaataccgtggacagttatcgtttgctcttgtaatcttcttgcggtagagaaagaccctggccacatagtactagtctccccgatatcgtcgattgaatcatttgtatcgaggagatgcatgtatcgggaccattcagccgaggcagcgaggatacccgcagctgtgtctaaagcttcagtggtgaacccaaattggtggtatttgtcattgaaagacgcgacagggtatattgggcgcgagtacgagcggatcatcgcagattggacctcggtggcctccgaggcggacgcaatccagtcggctgggatggtatggatagtttcatttctcaagccggctttgtggctgacaaggtcattccaatcctcctcgtctgctgggatatagaaatcatcgatttttgcgagttgacgagcagttggctgtttctgggcttgagccatcgttctaagtcctcgcaaaggtccaatcagtaagacacacgaaagggggggggtctgggattaacagaaatggcctcataatagtgagctacaatacctgaccagaagtagaatgcagaagaatttcgagagatttatgatcggtgatgagtgatgggtgggttgtaaaaaagtacagatgagcttggctaggaattatattgcggtgcctcggtgatgaaagcctaatttaactgctgtgggtgtacgaggggtatggtctacttgataggaggggatgccagctgagtaacttctgttacgatcaagggtcgttggttccttccccgtaggaatcgtgccttcctaaggcggaagcgagcgtaccgggttttgcatgatttgcaagggaagggcatagaataatgatttattttaagcggcatacggcagctagctgagcaacgagatgaggaatcagtactccgaggcttcaaagtagggcaaggccagcgaaatatctgggattgttaaagggacccccctttgaccaatgcgacccccccggcctattttttgtgattcggcttaccgccttccacaccgccttagtgtcgaactccctagcaagacggtagatacctacaatttgtatataaaccactaacaaaactaagtcacgtttatcacatcagctacttcatcgtcaacaactactgcaacaactactccaaagaccgctctatcatcataaatagattcaaggatataggcatgagataaaatacacgtttttttctgatcaaaacgtaaggtttttttgactatgtaaaaccagaattcaaaagtgcagaattaagtctggcaaaattgaattgatgcttgattagtaagacaaaatactgaaaagtcaggcagacgggtcgggcgaattagaaagaagaaaaaaaataaaaaaataaattgaatctgtatagtttagacaaatgaaaggctctatgtagtccgtatgtatcgggtccaataaaaattccctgctgatgcacagataccagatacatcattgatgattttgatatatgggtcacaaaaatccacaacgcctccatatgccacatgtctgcaacttagggcttttggtcaaatatactcgagtcgcctattctgcctttgtctccttcggctccaatgtcttcggtgcttcggcgggctttttcaccacagcggggggttcgggtgctgaaggggctgccatctgagagtgcttgtgcttctcgcgtttctccataaggtaagtccaactcttactaaggcctgccgtgaacggtgccttgatcgtctggacagtacttggccagcggattgtcttctcaatggtcttggagacctcctcctgaagatcatcatctccagcaatccgtcgctcaaacgaaccgccttcaggccggcgaagaacctcgtccgaatccttgctctcctgcatcaacttattgaaatcggcccgggggatgccaaagcgagactggtactggaagtacaacttttgccggaaagcttcaggcagacgacgaaccatgttaccacgcatcacggggtccatatcttgcgccatggctaagatggcgttcgggtcatcgatccaatcctcgttgctgcagcgggggtcctggaaagtgacattgggcaaattttcgatgagcggtgcgtaaagccggcggaagttcgccatttgtcctgaaacaatctttcgcaccttgccggggtcctcggcggggaggctcatgcgtagatctcccatgtagctcatacctgcgattgtggtatataactcgaattcactgaatctctctggcagtaatagcagtgcaacacgcaaagcagacagcaagttcatttggttggccaatcgcaccttcgggtggtcacgcaagatcttgacgggcttctgcagacgaccggcgagatacatggtgtcccactgggtgaggtctcgacataacgtatctaggttcaccacaccatatttgatcattgtcccgttcacggtgatataaggatggaagtagacacccgcgccaaagcggtcctgtacctgagagaccacgtacgaccccagcgagcctaatgcagaataatgatcacgatgctggtgtagattgatatcatgccaatgctgggagtatgacactccgaaaatgaagtcaatcatcttcccggagcccttttgcatattttggatggccgagggtgccgaggggtgcagtgagctggatggcaccccgctgccagtctgcggaaagacacccgatccataggcaaatgcgtagcgaattggtgctctgaactgccaaaggatcattcgcaatgcctccttgaaatcttggtttatgaccatatgctggttgactccgaagtccttagagggaagttccgagaaattggtaattgacaagttcggattttcgtcccagttctcgggtaacagcagagaggatgacgtcgagaagtaggaggaggatgagttgttggtaaacaccttgcatagcagatgcgaagagctggtatttgccgagggccggccattgtagggggtaattggattgcaattgaatgacaggaagcgagtcgaagaaggaacaatacgtcgggaggagcgaagggtgcggcgaagggtgcgagggcgccagagagagctggggttagctcctcgggaagcaaccatctaacagataagttgtagcgggatcatcgggtacggtaggggatcagacatactgttactcccggcatgattagggttgaggcgaaaggaatcgaggggtgtagcgcaattaataaagtcaagtcaacgagcccgcatataaagcaaatgagtgagtgaattgaagtgaaatgaatttggacgccccccgtcaacatttccggctctgacgtactccccgtccctctccgcttctaattcgggtgctgagtcatggtcacgtggacgcgtgtcgaaggatgcataacaaccaaaagtaaacagacgcggaggatcaacaaccacgactctttcgacaaattcgcctacttccccgacgaagggttgctttaaatgttgagcattagtactaattgtatctgacctccctgatatctcgccatgggctctgaaatggatacctttgcggcccgcctagccagcttcgatttagtgctgaagccggagaaacgcagatcttccggcacaaaaacacccaaagcgattacatggccgcaccagcgaccttcaccagctgaggtatgtcattcttcgaagagattacacgcgccgtttaagatgattgacttggcgggattatagttggcacacgctggattctactacaaaccatacgagacaaatcccgacaacacaacatgtttccagtgccaccgggcgctggatggctgggaggaggacgacaatcccatcacagagcatctcaagcatgcgcccgactgcggatgggccatcatgatggacctccaacagagtagctccaaccccgcctcgattgaagaccctacgggcgaccgaattacgcaagcgagactggcaacatttggtacagtgtggcctcatgacgggaaaaagggctgggtatgccagtcggagaaggtaaatcgtgacttcaccgtattcatattattttggctcacaacaatgacagatggtagaaggcggatggtatttctgccctacagacgagagcaatgacctggccagttgtgtctattgcaagttgtctttggacggttgggagcccaaagacgacccattgtgagtatccatcgctctttcttagttggacgattgctgacttaccccagtgacgaacactatcgccgctcctcggattgttcattctttgtcttcgcccagccaccaggaaagaagagcaaatccgctcgtgctaagaaacctcgggtttccaaggcatcctcccggctctcaacccagtccgttggttcagttgcatccgaagcgcccgatatggaagtagatgacccgatgggccaaagcatcatgtcccaatccagcacaaaatccaaatctacgaagaaggcaccgaagagcaaatcaaaggggaccaagactaagaaggaagaaccagcggaggtggaaagccaaattgacgccgaaattgaagaagtcgcccaaacagagcctgtcaaacctaaacgtgcaggcaaaggaaagaagaggaccagtgaggatatcaaggatgaaccaaacccagttgccatggaggaaaaagagccatcgcagccgccagcagaacctccagcgaagagacgcgacacaaaaacacgcagcagcagcattactcgcagctacaattatgaacacagtgactctgcaatggcagacgcaaggccggtggatgaagctacttcggaagaagaaaccacgagaggtcgcaagcccacgagaaagagagcgtccaagacccgcaaggtctccgatgttcctgttgcatcaaaagccccgtcaaaggcgcgagctcctcgtgactccgagatcgaagcggaaatcgaagcaggcctcgaagctgatatccccacacctgccgaacccgagcctgagatcgaggctgagccagcagagccacgggcgtcgaagaagacaaaatcgagcaaaaagtccaaggctgtggctagaattcccgaagcgaccgtgcataatcaagtagaagatgtcagtgatcgcgaggaccgttcagatccccacgtggaaccggttgatgatgaaccggaggcgccagccccaaagaccaagctggcaaaaggatctaagaagaaggggacaaagaaaaccaagaccgaggagacgataaaagcacagtcgccagagcctcgagaatccttagggctcaggggtcccgatgttcgggatgattccgagcgtcatgactccttcgtctccgtcgagattattagcaaggagccggagaatgcaccggagcccgaagaaccaatcgccaaggctgaatcgaagaagatttccaagaagaaggatggcacatcaacgaaagagaagaagtccaagaaatccgagaaaaaggcggagcaagctcctgttcttcaaccctcagtcgaagaacatcgcgccgaaccgtcagtcgaggaacaagacgatgaattcgagactacagacgatttgcctgaccagcttgagatagtcaacccttcccctccacaacaaatatctcccgagccacaatctcatattaagacacccagtctaccgccaaagactgccaaacggtatagcgatatcccacacgaagagcatcttgcggagaccttagtccaaagccagatctcccctcacgaagtgcatgagcctcgacggaattcaaaccgctctaaccgggccgtttcaccacttcctccagcccaccaaaacactccctcgccgtcaccccagtcatcagatgcagaaaaccggccgccatcgcggccctcagcatcccgtgcaccagtccaaccaacacccaagcaacctgagttccgagtccccctggcagttagtaccccatcgccatctaagcgcaacgccaatggtggattcggaccttctggccatccatggacaccggtggatattgatgaagtgctgtttggagaggctagcgagaaggaaaacgcagatttatccggactgttcagaggcgcgaaagccagcttgactagcccagagaagaaaatgacagtccaagaatggatcgcgtggaacgcaaagaatggcgaagaacgactgaagcgagaatgcgagcgacttgtcagccaattcgagaaggaaggtggccgagcaatgcgacggctcgaagctatcgagtgcatcgactaatcaacaggtacgctatgtttttggatgatatgatttgcatgttaggcgttatgctgggtgttggggaacccttgttagatctttagctcgcaatttgaattttgaaagtgccattattgcacatgaagaacatgatcagtaaaacaaagcctgggaaatatgccaaaacaccatgggtatcaagaatagaatgcgcgcccgagaacaacactcaacaaatgatccccaaccggccctcccagctatcatcctccttcttaaccttctccttcttccgcttctcagtgcgcttgcgcctcttctcctccctctctttggcatcaatctcctcccgctccttgagccgcacccccagatcaagctgccaagccttgcgctcttcctcgtccctctgacgcttccgatgcgaaagcatcctcaatcgcaagcgcacgtcctcaacattcgccctcttcacctcgccactctgccccgtcgcaatcagatgctgcttgctgttcaagtgctccacaagctgcaagttatccttgtaggtaagatcacagtccttgcagtaaaatccagcgccgaggccgcgtttgcccatccccgagcctgcgggcacaatcatcgtcttgcccaccatggacgcgacgtccaggcgctgattgcgggctgtggtatcctcgagcgagctgtagtcgactggtgcgtggtatttcttgcccagtagcttcgcttcgtagcgggctttgccttcggctttgcgctttgcttcatcgtcggcggcttttttggcgtattcttcgcggtcccaggttttgcgaaaggccgtgtccgacaccggggtgccgtaggagtttggtcctgacatctctgtggttgatgtgggtatttgttttggggagatgtagtggaggttggtgagtggcggatctttaaaagttgaaggtcggtttgaggccgatatggaatattacataagcgatcctaattgggcaggtgaggttggaacagaagtacttaagtggctcaacacacagcttgtctttgttccaagtgttccaaggctgtttattatattaagatgtcctagcataaagaaatagttattatctacaacttgtgcttattaaatacgataatatgtaggatgtaggtaagtaggaggatcttatcatcacccattcaatcatatgagactatatatacatccatggcctcttggaggctgaaaataggcagctgttttggaataatcaagtaccatttgatgattgcatcggggtaaatagctccaactagtaatcagtgtcggtggattcactttcaggcagcagttttcgacccgcatgtataagatgaacaatatcaccacgtcgaatgtacacaattgagccgcaaagaactcggaaaatatccaaaaacatggagacatcccaacacccttgttctcagcccaccagcgctaacctaatgactctcccctcggaactccatatccaaataagcacctacctttcctatccggacgccctagccctcaaacacagcaaccgtcacttctactcctcagtcttcacaggtgtacgcctgaaagttgcctggctcgtcgagcgatttaagtgtggactcgaatgccccatggagaagtgctcgttcagtactgacgagtctttttgcaatgggcgtgtacgcggcattatggaacgccgtcggtggcatcttgagtgtcgtcaggttgggaatggttgtctgcttgtcaatggccagacttgcccgccgcattcggtgcccgcttggttcaaagttagggcacaggcaaaaaggagagttgtcaaggcagtagagagctggggacatgaaggtttgttccctctttggttctatcttattcctgtctgataaagacatgagctgatattgtgttgcatagcctttgtgattggcattatggctgttctgctgaacttattgtggcattttgcccagaggtgagacattgtcttatgcttccttgcgtgtggtttgaagacatcgttaattgaactcatcagaaattggtacctcgatagcagattgagaggacattatacgactactcattgagtgatgattcaactgagttcgggtgtcaattgacgatcagccacgaattggtgtatagacgaaccatcggtcgccataagaaacaaatcgccaagcaatctagcaacacgctcacaaaagatcgctacacaaaagcgtcttcagcatcttcaataagcatgatgatgtaatggagcttcgcagaatattcgatgcggagaatcgagttagaccctgacggtaatgcatcatcaggagacacatcaggagacatattctcacagacaaagctgtggagacataatctctgaaagcaagcttcctagatggtgtgatgcgttgactacctcatcttgcggggaatcctagccctaatccggatcttatcggtgacgtcatgttgacgactacgcataatccctacatgtatataagttctctcgcctctatgttcatcaccaacaatctctactttcctccaccctttcattattcgaacataaaacgatatgtctactacaggtgccaccatcaacaccacgacgggtaaccaccccgtggacccctacaagacccagagcttagaagacccgcctctccctcagaagatcgaagagctggttaaatttatctccgatgttaaatttggcatgttgacaaccaagcagtcagagggtgactatttggcttcacgatgtatggcactagccgcaacggtatgagcagagccacagataaccacaattcaagggcaatcatgctaatccattacccaaaataggagcacggcggcgttgacctcattttccacacaaacctcttctccggcaagacaatggatcttactgtacacccaaaagagacaaatatgtccttcctcgaccctatcagcggagcctgggcctccatctccggtactgcatcagtgatcggtgatcccgaaatcgtgaagaagcactactcgcccggactcagagcatggattggcgatatgggcgatggtgtgcacgatggcggaccctcagatccccggattggcgtcattaagctcgaggctaagttagtcacgcatgttgttccccacaggggcctgcttgggcgtgcctatgaaaatattaagggtgccgtggagggtaccgttcctaatgtcaacggcattcgagagatgagtttggaggaattggccgagtgtatgtttcctttctctcctttttcatctttgaatatgtgccacggacatgctaactggtctctgtagggcgcgtgacgcatcaggaataagtgtatattactatgaaaaaggagtacgcctttttggttaggaaggtatataacgttttgaatggaaataaaaatgaatatatttgaatgcatatgcccctcccctaaacggtctttctgcttcgtattgttcactgtaaccagtctatatcgactgagatctaatctgaagacgtgggtaaaaagccgacttttataagttactcggcgctcttgctgacctcgtagcccggaggtacgcaagagcccttccgatgctcgggtacgagttccaattttgttttcagcccagccagccacattggtccgtaccgggacacggccagaacatcatcaccgtcacagactgtaagctttagtgtcaaccaaacgtgaccaaacctattcggcagcatcaccgcaccggagcacccatgtgtacggctaagcgagtgaccatctaatacaagcagaataactatccactttgcagctataaacggtgctgcggcgtctatgctgttggcgctgctgtttctggtttaatgcttcaatgaaaactgaacagtggaaatatgggactcccgttctgggcacataggatgaatctgatattcaacaggtcccttgaaggcaagataaagaggggaagcttccaagctcaggtaggatgttatattattctattactagccgtggtaatatcattcagccaggggggaaaggccagctgacatgcaaataagagactaaatattccaccagggcataagtctctcattgggtatgctcaacggcagacatacctcaagtactccgtggtctagcggagattgtgccgtagccctcttgctgatatcagaacaaacaaacattatggcatcacaccgaagaatgacggttgtgaaacaagtcggccggaaataagagacgtcgttcctgttctcatcatcacgttaccatttacagatttaattaagcgagcctatgtcgttgtttgtctcatttgtgaatagtggcagaagcctacctcccttaggataactataagaagatgaccctgcccccagaacttcttcttttctttcttcttcagctctctttgcctctggcttagatcaagtgtagtatctgttctattcagtttaatcgctgaatggtctgcattgcagaacgtcatgattattccaatatttagacctcgcgacttggcctctgtgcttgcacatgcttcgttgcacagtgtcattgggcttacactaccctcgatcgacgcgaacgccttttcatcaactgttcggcttgtccgggcgcttggagaagatctctgttcgtctttgtccagtggttccatttattcaccgccttcttgaagcctgaaaatactggctggcaatattaaccaatgtaagagttctgccgcaattgcatacccgtacaaagtagtacctagtaggtacaatgtcgggtcagtccgcaggcgtgatccctgggctgagtgacatctagctgagatagaaaatggtagatctaggattaagcaaatcctgttaattatatccataaaaattgtccaaaaaaaagatatagaaagaaacatttctttcaactcagtctttgagcaatggccatctgtataaaatacattgtcaggtatgtccatcccatattcaccccattcctgctctccagtctcaagatcctcgcaatagatagcaaaatgggctaaacagtccaaatgaacacggaccaatccacggtagtactctccatagtcattttccgggtcttcggggcggaagaaagagtcgataaagttaacataaccgaccatcccccccggtttatcgttaatctttggccatggtagcccctgttcgataacagatggctttctaggcgccgcactggccaagattgatcgtatacagcgatcatctaacaaaagtgcgtaaccaaggcgaggaatgccactagatatgcggaggccatggctttcgacccattctttatgtcgacgttggataaccgcttccgacgcgccctctaacgcggggtcttcaaagataacattccgataaccctcgcggaccatttcaacgcatttgaggtcgaatcggtgccagctgcgctcgtaaaactccaggtcagccatacaggcctcgtcgagcttttcaatagctctagtccagtcttgatcggaagtgttgagataggaggtacgatagatggcccatccccatggccaacccccactcctaccagactcgtagtataagaagtgcggtacagactcccactcgggatttgcatgctgtcgattgattcgttcgacaaaagtttcttcgggtgggaattcagatgaacgccatggtgtaggccatgactcatcgtgaaagatactgggttgacgtggattccagggcatggttccggcaatggttcttgcaatggtgttgtaagtgggtgcatttagttggccaggaacttccacggcttgaatattttgaatatcgcttagcgcctgagtagaacccgattaggaaggcggtactggaatagcggtgtcctccatgatgtattgtcaataaaatattaaaaaacgaaatagcacgacggctgcatgattcgaacatgcgcccgcgaacggaattgatttctagtcaatcgccttagaccactcggccaaaccgccatattagataggtagcccgctccaaatgtgtggtagcccgctccaaatgtgtatcatagagctgataggaattgtgtatgctacgctggctagcctgaatagttctcgctaaaaataaatactaggaactctcgtgaaacatatctccataagaaatgaaatcttagtagactattcggctcaacggagttggtttcttcctagatagctcgagggctatagtaaatctaggattaaggaaattctgttaattacgtccatgtactccgcagcagcaaaaccataaaaaagattgtcagaaattgtccaaaaaaaaggatacagcacgacggctgcatgattcgaacatgcgcctccgaagagaattgatttctagtcaatcgccttagaccactcggccaaaccgccgtaattattaatagtaacatccgaactttggctctataaaccagagataataaatgtactatcaatagtcagttgaatgcagtcagcgaaccgtacgtagtcttattataatatcatgaataccgaagaactcttattatctcactatctctggtatatcctactacccctcaatttcccacatgttggactggaaatctgtaatgtttatctacccccgaggcaatccaaggggaatttgtacaaaaaatactaccgattttggacttaaacatcttgcccaagtgctcaccctttcactcaatcagtatcagcatcatcaaagaactcatcccagctgtacgtcggcccgacacagtaagcattcccagcaaccagctggtcgctgcatttatccggacccagagaagggttcacatccaagaataaaccccaaggaatcttgctctgtatgcatatcgtagtgcaggtttcttgcagcgcttcatttgtgacaacatgccacttgccgcaacgagttgtcgtcccttcagcaacagttgagtttttagggggctcgatttgcggaatgacatagccatcagcggaaccgggtgacgttggatcataaggcggggcagtggcattcgaagcaccagactgcggcgtgaggcaaatgacatgaccatacgcgacatcactgacaatatgaagattagagcaatcgtagttgatccatggattgtatttgcgtaatgtagttccatccttgtatccgacgccttgtgccttctcgatggatgtacagctgtcctcgcctttgatggtgtagacggtctcgcattggattggcatgcacagctttgtgccgacttggatatccttgcattcgaacaagttgtcgtgtcctatgaacagggcggctgaggagactttgtacttggtagcaatcgagtcacaggtatcgccggccacggttgtgtatttgatgccagatacgcacgagtctgcaggcttgtatggatcaattgttggttgcaggggatcgggaatatcagtaggaatattgaggttgcattttgaattgatgtatttgagttgggattggaagttgatgtcgtatgcggagtagggtgttgattgcatcattcggtaacggccgacatggcatgatgagcaaagttcagcagttggcatactatccaggtctgggttgaagccattgattacgtctatgtgtattcatggttaggatcgatcaagtgcaagcgcaagtaaacgggggcgggggatgcacgcttacctccacagtatttaccactcgtggcgtccttagcacaggtctcattccaccctgcccaagtcgccccacctttcatgttgaagggagccccagtctcttcattgctaccacaattggtagtaacttggtgaaaccaagtctctatagactgcccgcaactggaactgcaaaccagatcgcttagagtgtcgttgtcaaacccttgtctccatctaggcttttggaacatataaacctcatcgtcgcagtcaattagcctagtgatggctgtttggcaaatgggggacaattgtgacaaaaactcttgctgatatgttttatcgtaaaagtagaaccccgtgaacttgcgctggccaacgatgtcttttgctttgcggaaccacccaagcaaggatgataggtatccatttctcgcgtctttcgcaaatatcgcagtctcaccgagtgggctgatagactggacaattgccttggtcacaagattgacgatccagatatcgctactctgctcgacgtagaaagccttttcttggcagttgtttgtttccaaacaatcttgggaatatgagttgaaccaactatagatgcctaggaaagtcagcaaaagcctaagttaagaccgaaaaaaagaaaacatacctgcaccaagcatatagattgattccgagttaatcatccgtaccgcccatgagcttgtacatgtcttacactcattgctgtccgggtcgttggggaatttccccagttcgaaaggctttggcattggcggagtgggttggaagtagggagactcggtctgtatcattcccataaccagattcttggcaccagaaaactggtactggtagaagacgctgtgttctgaggctgttccgtacatccaagtaggtccctggctctcaaccagaataccgcgagccacataaatgtcgacttgatcttgggtaaccttatcaaggtcatggtccgcaacccaggcccagaggttctctatataagccgaagcagattttgtgacatggagcagaagtgatgcagcgatacaatccttgttcagggatgatgcctttttggagcatttatcggattggagcttagaaccgatcgcaccgcccacgcggaagtgacaatctgtttttgttagttatctcatgcaaaaacataaatggtccgcgcagttggtattctcagtaaggaaaagactcaccccagagacctgcagagccctgtgtcgactcatgaacattccactccatgagtacggcaccagccgtgggcccagataccgtgaacatcatgttttgaatttcgagaataccggtatccccttctttgcccacttgcacagcgacgtggggattctcggcgtcttcaaatttgctgccagtcgccataatctgcggccaaacttgcccgataatgcgggagccaagaggaacatggagagtatctttaatgacataaactccgtaaggaaagtgaacaattgaagacatatttgcagcggcagagagtacactgttaagggccgctgtgtcatccgtgacaccgtcgcctttcgcaccataggccttgacatcgaaaacctggccacctcccaaatcaagatattgaggacggcggcgggcgaaaaagttagcggttcctttaacataagatttatcgctagtcagaattgatttgcggttcaaaacctgcaattgctcttgctgggcaaaatgaagtcctgtatcgtcatggtagagaccgaatccccacgaaggaacaagaacttcgtttcctccagctaggagaggctcggtgcgggtgtcggcaacaattgcatctttgacgttaaagaacccaacgttttgaagtaaaactgccgttgagttgtctgcgtatagcgatgtgcgaataccggtaggtgtgttggcgataatggcgtccaccaagatgtatgaaccgactgcctgaccagtgctttccaaacctcctgcctgatatagattagcaatgactcgtcttagatctgttgaacgggaacactcacaccaccagtcacaacaattccgctcccacatgactctatgacaacatcttgcattgtccacgcccagtcccaatggacctgaactgcggtcttgcaattcacgaaaacaagttgactggttgtaaactgttggttacccagataggcactataatccatgcataaatacatcagctttttctcattggcaatttgtgaactcgtacccgaagtttccacccacgaaggttaaattgctcatgaaaccgccacttccgttttccatgtagatgcccttgacagtcagtaaatggaatacttgaattatggaagcttacatacctgctgtgtgtttccggtcgcttgcgacatgtaaaactcgatattttcaagagttgttccttgggcaacttgccagtgaatggcacatacatacgcaccggggtctgtacgggtaatatccattttgaaattgcggacattgcgaaggaagttgtttgtgttcaagtaccttgatatggtgttagacaaattcgcacagttggggcttggtacttaccattgctcttggtcgccgacataaacgtcagaggtaatgacgcccaagccaacaaagctcgcagcagccaaaattgttggataattagtcggctaaatggtttggaatcagtggatggctcataataagagaacgaaaggttctaccatacatctcccaggaattgcgtgttgtaatactggatgatcggactgctgacgaggtatgttccaggaggaaagaataaaatagccgggaatattgtgcttgaaccacagtttgctccacatcgatttccactggagatagctttattgattgcggctttagagagtcgaacagttagttatatgctgagagtaattgacggcttctatcttaccagtgtcgtcggttacaccatcacccttggcaccatagtccttcacatttctccagacctggtaatagtaacattagctagatacaggtagaagtcagataaaggtgggttactttatatccagatggagcgaatggactggcagcattttgctgcagattggccaaccaataatcagaaccactcgcagctctctttacaagagtagaattttcggattgcaagtcagacgattgaagcacagtctgttcgtccgcaacataaccaaaaagcccatttggatgttgaagccgctggggaggtcggttggtatcgtttgtcttggacctgtacttagcatgcaccttggcagccagagcctcctcctcgccggtggaagcggtgggtcgaacagactctgctaaggctcttgctgcatcggcgagatccttaggaattgtgtaggcaaagctatcattggtgttggtgctttcttggcgtttttccttggacaattcagactcagacgcattttgaagggcggagagcctagtgacagctccccttgaataatccaagggtggtgcgtttattctttctccagtcacatcctttgcgttggccatggaatatctgttgaattttacattgtcaactcttaacttgttgacaacggccaatgctctcagagcctcggaaaccttggtggcggcatcagagttcccaaattgagaggaactcgacgcagcagcagaagaacttgatacagtgaccgagacagaggcgacattctgacgattgaagtgctggtgtaggtgttcatgagaatggtgggcatgaattgcccatataccagtgatctgacagataagcagtagccatcgtagaacaaaaatcacccccgccatcttgcaaataaaaaggcttgaaattgtcactggatttggagagttccaggcagaggaactcctagagataaagaggcgggctttattggaaattgcatcccgaaggacttacaacgtatgtcgaatggtttcgttggaaacccgagttaatctccggccaattgcttggcggttacatcgtttctgatagtgtgataaaatccctcaaaatcgaggggatattaaacgatgccaagtgaaatgggccaaactggggaatgctgtatatatattatttccaccgctttagtttccgccttcgtattatacaaattaatacggagttcattccgcatattctcgacttaggacagcggtctaacctaattaaaagagctcatggctttcctattttcaacacgagtgccatttattatggtatcgctactgtaaaaagcacagccttcgaataatttcagccacatggtagcttcattgatctaatcacctgatctattaccataaagctattcagagatcatctgatctattgagaatcacctgatttactactcttttcccgactttattcttctatgaacctactattctcaactgcctattactactccatgaatatcgctccaattaatacttcataaagtagtgtaatactcagaattaaatactctttcttatggaattcatttcatatttcgaaaaaaaaaaacggattaggtgatcgatctctgaacagcttcatattttgacagaacagatgtattaataaggtaatctctgcatagctctgttgacaaggatgattgaattaattatgcgatctctaaatagcttcattgacaatatttgtattcatcagtcaacggtatgcttatttatggtaatatcaaggaggccgaataaattatagcagtattgtattgttccattagcagcgattctaccattctgcatggcagaaatcgcattccccatctcggctgcccatagtacggccaagtgcttgagcttcagatttcttggttctgggtcgattttccgccgggatggcccgaatcctgcggttcaaccggaaaccaagccgtcttctcctgggcaggtgcctagatacagaaaagaggcttgaaaatttgtggatgcagtgctatggtatcaaccgccaagccacccggacaatcactagttaagcctcgttgtttggctcactcccattttagacccttattggatatttggacttcgtattcggtcccttcgaattttataggcaccacaagtggggttttcaaaagcggcgatgtaacaacgactctactagcagaatctactccgtactttcaagcgaatttccacttttagcacatattgcaatcgtaggattcggatactcctcgaatcggactaggtgcaatttcccggtgtctcacctcaccatgcagtagttcaaagttatacccagcaattggcttctgataagtgtataagatgctaaatcattcccactatatttttcaggagctcaagccaattagccaagatgttgggaaaacatatgctgaggttaagcatactattatgtgtcttcgcactgctagtccttggacaggattgcagtgcaagcaagccttgtgctacaggatgctggtaagtgtagccttttgggaaatggaaaaagaaacaaccacgcatattctaactgttggttgttcccgttagttcgaagtctggcttttgcggaacaactccagaacactgtggtgacggatgtctggcgaattgtgattataaacttgggtgtgatgcaaacaacccctgcgaggaaggttgctggtaataattcctgactcccggtttgattggaatgatcaatgtttaatcgataatcagtaataaattcgggttctgcggacatggccccgacttttgtggcaagaatgtctgcgttgctggatgcgaacgcaaatcggaatgtgatcccggctttggaggagaatggtcagagagcaaatcgtgtcctctgaacgtgtgttgctcagatttcgtacgcggcccaactgacctctggatgttgtgaatgactgctgactcgaatatctccagggctactgcggaacaacaaaagaatttgtaaggaataacccgcatatctcgatatttgatgtactggctaacatctcttagtgtggcaacaaaaccgtcaaacacgaaacctgctctaaagatcgctatatggacagagtcgttggctactacgaaggatggtctagccggcgtccctgccatgccttctggccagaacaaattcctctcggcgtctatagtcacgtcaacttcgctttcgccactattgatccggatacttacaaagtgacgccgtcagaccatcgggatgttgatttatatagccggttgacatctctgaaaagttacgacaaggaccttaaggtcatgatcgccataggtggctggacattcaacgaccctggccgaactgcaacagttttctctgatatagcagcctcagaagcaaagcaagacaaattcattgcttcattgatctctttcatgtctacacatgattttgatggtatagatctggactgggaataccccgaagccgacgaccgtaacggaaagccagaagactttaagaatttcccaaagttcatggctaggctgaaaaacgaactgaaaaagacccctggacgaagcgaactctccatcacgctaccggcatcctactggtatctccagcacttcgacctcaaagagcttgctaagcatgtttcatttttcaacatcatgtcatacgatctgcacggcacctgggatcaagggaataaatggacgggtgcgttcctcaacgctcatacaaacttgacagaaatcaaatctgctttggagctgctttggcgcaatgatgtgaaaggagaccaggtcgtcatgggtctcgcattctatggccgttcatacacaacccaaggctgtgtagagcctggatgtgtgtatgcctccggaggtcttccagggccatgcagcaatgaggcaggcatccttctcaacaatgaaattatggatatcatccatgacagaaagctggtgccaaagctgtacaaagaggccacggtcaaggttgtcacttgggatgatcaatgggtctctatggatgatcgagagactctagccatgaaggccaattttgctcgtcagcaatgtctcagcgggttgatggtctgggcgatcagccatgacacttcaacggcagacttttcacgtgatctagcaatggtgtcaaaccgccaagtgttgatgcaacgagccgaaattgacaccgatatcatcacagaaaggaccaaccataagcaatgccactggaccaactgtggagatagctgtcccgcaggatggcaaatgatcaaacgcgaagacgattggaagacaacgaatcctgaatacatgatagatgatacccactgcgagggacatggctcgcgctcctggtgttgtcctcctgacgccgaactcccaaagtgtggctggtataacttcaatagaggcaattgcaagcctggctgtgaggatggaatggttgagattggctcgacaacaaacggatgcaaaaaggaagatcaataccagtcggcatgttgctcagtggaagacgattatggaaatgggttgagcagcatggcagtctacaatacctgtgaatggtcgaaggagaatccccagtgtgacgatggcaagtgctctgggtcaaaaagcacaatccttggacagtccggtcaagggagcggtgatgtctactgttatgccggggacgtctggggcgatcattggccaaaaattcagcataccttacggaaatactgctgcaacacatcatctaagagcaaccgctttgagaactgcgaatggcgaaatgacgtgggtttgcattgggtcggccaaagttgcttctccggatgtgactccaatcaagtgcgcgtggcgatggacggctttaacgaaggctgctacaaatccggtgcccgagcatactgctgtgatgcagtcagttacacggagactgagcgcatgtctgatgacctgcaaaaattcaaagatgcactcattgactggacaatagctgtggaatgtacgaattattactactccgcaacaccagccaagtctctaagtattcgtgaggacgattgcgagatctttgcgtcacatatacttgttgcccacctggttgaaatcctcatgggttacgagtccaagcaaaccacccactggcagcgcttggtcaatatctggaacgatgtcgtaagtaaccagctcaagaatttgaacacccgcattatgcttccgttcgttttctcgaatacctcatttccagagctcctcgcaaacggttatcaaaccaccgccaaaaatatcctagatgttcccgattggtatgataaacgatttggaaacaaggattcggggataacatgctcgaagagcctgtgcgactatgaagatggattctgtgaccagaccgacgacgacgacgacgacgacgatatgtttacccgacgcgacctccaatggcaaaaggtttgtcaaatctccttaatgcatagatccaactaattttgaataggacaatggacctgtcctacagaagcgtgccagctccaagccgatggacttcatatgtattggtaaagccggcgtggaaagagttttggcgttcacccgatttgcttatcctggcccaaaggattggttacaactcaaggccaaaaagccagatccaaaaaaacaggtaacggtcaatgaagccgtcgactacaatgatgacaaggattgcggggacactgctatacaagaacgacaagcgacgactgcggagctcgaccctccaaaaggaaaaaaatctaggttcaacagtgagtgttcctggcgaacgaaaccttggtaaatcactagctaataatgatctagcggatcatctcctcgagatcaagttgattcccaagtttatgctatgggctattggggcggggaactgtcctgttgattgcgacttcttcatcgattacttcggcgaagatatcatccccaagactgcagaaaaaacaccaggaaacaatcttatcctccaaaagcctattgcgcgagtaatggagcaacttggaagcaaaaccaacttcgatgtgttccggttgatggactcagctttgaacgcagtaaaaggcgacgtaggtctctggtattttcaaccgaagaatagtgctgacttctttcgcctagctctggagttttgatcgcccacaaaacaccgcatttgatgatgccacatggctgccacttgtcgactctgatgacagctctaaagctttaaccttgctacgaagcgtaagctggcctgtatatctttgattccccggcttatttttccctgctgacctgttaccggctcgctgcaggtcttttccgtctataattatcaaaattcagaaaattttcagaaacgattcaatattgtctacaagaagattcgtggcgagttagatttggctgcaacagaatacttcaaactttctggaaaggcagttgaccttggggagtgctgggatcgctttttcaaaatccagaaggacttgatggtgagctttggaaggaaatttgttgagaaaggaatcgaagagttagctactcggtgggctaatgattcggacaaggagaaagctgaggtggttaaccaggtgctgaaacagttgagggagaagatggggcagatctatatgaatgatttcaaagcagagtatcaaccatcatggaagtgattttgcctgctcgtccaagctggtcggtatcgtcagcctgagcgtcaaatgctattgggtttagacatatgtgccaccagcgtttactttctttcacatatcggactatcccatctaacaattttatcgtgaattaagaagtctagggcattcctcattcacttgccaacctctcctagtctctagtaaaactctccgatcaaaatgattatcccattcgacggtttgtggcattatttacacccatgtgttacagcttatgaagaagatcgcacctaattcatccatgccatcaaaaaggcgtataagtggacggaaaaataccctttgacacacatcaacgccatttcttacatgtctcttagttttgcttgccgaagggggccaaggattggtgaacacggatggacaactgaaggtataaatagagctcgaaccctctaatccactctgcgcgcagctcctcagaatccctccacttgccatccatgcgattcccacccagcagccatactcggtgcaggaggtctacgtccagcccaaccatattgtcggggcaccgttaagtcttctattcgttgctatttacgaccgaccgccaagaccaggggaacatgatatccctctcaacgccagtggttttcttgaaatcactaagatgctattctgatatgctctattttgctattgggctcactacccatcttctctagatacttcttcgattttctgtgtatcgttaattggaatatttctacaaagaactgtacctctattgacctaaaatctattccatctattagggatctagtacgcatattatccttaatggtccgagctattatcacgttgagcttctcgaggtcgaagtagttcgtgaattggtttttttttgtctattgtgtgccaatagtgttttatagtacgaaaagtggatgtaatttaatagatacgtaattatctactactccgtagctaggaaataattggagcttttaaacgagagacctaattagtatgtccatacggagtactctgtttcttcgtgcgtgtaaaacatgcacgtaatcagtgtgctttgtagtggctaaggtggccgctcactatatcaataatggcggtttggccgagtggtctaaggcgattgactagaaatcaattccgttcgcgggcgcatgttcgaatcatgcagccgtcgtgctatttcgttttttaatattttattgacaatacatcatggaggacaccgctattccagtaccgccttcctaatcgggttctactcaggcgctaagcgatattcaaaatattcaagccgtggaagttcctggccaactaaatgcacccacttacaacaccattgcaagaaccattgccggaaccatgccctggaatccacgtcaacccagtatctttcacgatgagtcatggcctacaccatggcgttcatctgaattcccacccgaagaaacttttgtcgaacgaatcaatcgacagcatgcaaatcccgagtgggagtctgtaccgcacttcttatactacgagtctggtaggagtgggggttggccatggggatgggccatctatcgtacctcctatctcaacacttccgatcaagactggactagagctattgaaaagctcgacgaggcctgtatggctgacctggagttttacgagcgcagctggcaccgattcgacctcaaatgcgttgaaatggtccgcgagggttatcggaatgttatctttgaagaccccgcgttagagggcgcgtcggaagcggttatccaacgtcgacataaagaatgggtcgaaagccatggcctccgcatatctagtggcattcctcgccttggttacgcacttttgttagatgatcgctgtatacgatcaatcttggccagtgcggcgcctagaaagccatctgttatcgaacaggggctaccatggccaaagattaacgataaaccgggggggatggtcggttatgttaactttatcgactctttcttccgccccgaagacccggaaaatgactatggagagtactaccgtggattggtccgtgttcatttggactgtttagcccattttgctatctattgcgaggatcttgagactggagagcaggaatggggtgaatatgggatggacatacctgacaatgtattttatacagatggccattgctcaaagactgagttgaaagaaatgtttctttcttccccagatagaaacgttgacagaactgcgagtgtgactgagctcgagtatatcgagcgccaggatatggagaacttagcattgagtaatgtgccgggttctacctaacactggaatgacaccaataccaacggcttttttaatccctagataatccaacagttatcctctttcaaaaggtctttttggtcttttctaggatatgttagaacatgaccactaactacctccgaatattattagtagggaacctttgatacaagctatttctagacctttaagagactgcatacatatttgtataaatattgattcatggcagctgattaacctcccggcgaaaaacccggtgggcgcgatggacccaaaaacctccgtaaagagcaaactatgacaaatcagaataacatcctagtgatttcaagagaatcattggcgttgagaacgatatcgtgttcccctggtcctgggggtcgatcgtaaatagcaacgaatggaagacttgacggggccccgacaacgttgttggactgaacgtagacctcctgcaccgagtatggctgctgggtgggaatcgcccggatagcaagtgtaaggggggctagttgacatttttcaaaggtgacttcagtcaaccccatcgagataataataacaatgcgcactagaccccggggaatgataagccatctcttagcgtcttcgcgaagccgagggagggatttagaaacgcccattggggcagcgatctggtggtaagaacgcatggcctccctgtttacctataccggcggtagacttataggtagctgttccagtctagactatctctaaccacctgagtcccattgcaataagcttcctgtcggttgctcgaccgaattggtttgtgactgcgtcatggcgttctgataggaccactttgatcagccctttcgtcccctcctatcgaaaacgatattcaatacaccctagactagtcggatgctcttcgttgagatttttaattgctcgtgccgatagaatgaggacgacgataaactcattgccatctcccttctcttatagagaattcagtaactgctcagcttcgagccgtaggcctttgaagcctcggaaagtgtgtacaatagggtccgcgggaagggcggacataagggaagtgaaagatatgcccttctcttgtcttcatatatctgaggctggggcagaatcaacgtgagccatggtgattcggccaaccttggtgccttccataggacgtgattggagactttctgaagtttgatgacccgggccataaagaagttaatttacaatttatgagcaactgatcggccaaataaagctacaagtgaactactcaggcacttgaattaaacaaaaagtaaaagtgaactcaattgaaagagaaaattgggtatcgttcgcaaactcccgctaccatccgctaattcatgaagcggcgtcaaaaattgacgccgaagtgagcgaagattcaaatctgatggctttgtcagcataagaacataaacagaaggtttatagactcaccaatgcaagaggaatgcggtgaggaacccgaccattgtgcaacagcatagccacggccttctggggagtagcctgtagcttgcggtaggcctcccgaacgtgccgtggctcaatgggagtgcgcccctcctcgggcgggtcgaacaggccagtctcgcgcttccgcttcttgaggttctcaccggcctcggcgcccccgcgacggtgcttctcgttgtcttcgcgctccttgactttgagcgcctcctcagtcagggtctggacgatctcgaatgtgagaaatccgaggatgtccacaatgtcgtcgttcggcttggattcggtcacgatgccgaatcctgcccattcgcggaatcgcttactcttgcggtaggtaaaggaagcctggcggcactcggaccagaatacatactcttcccttgtcatgtggcgggtgcgttcatcggcggcggcaagacgctggagtgtcgcgtagttctgctcctcctcttcttcatcttcttcatcttcacgttcgggaacctgaaccgagtagaaactgttgacatcccacgcaagtccgaccttggcgcgcttattcttgggcttgggggcgacgtcttgggggcctgcaacaacaccagccgcatcgtcggcggcagcgaagtcggcggcgtcaccaccacccttgtcgtcggagtccttgacatttttgcggacgtccttccaggacaggaaggttcgcagacgggagactttagccctatcgtggcggatcaggaaaatcaggtcgtcggtagagatcgagcgaactccgcggcgggttgccaatgcagtgctgcgggtaagcttacttggtcattagtgacaagctttctagtttgaaattcccgatactcacgatttcgatcacctgttgacgcgtgatctcttcaattaaagtggtagtctcctgagccggctctgctgtttctccggagacaaacatcatctcaacatcgtcgttagtaaaggatttcccaaagttgtcttcgtccatctcatgatcttcctggctctcggtaattatttcggggctagttgcggcattgtcgattcgggaactgaacgaggtcaagatgcggctggaaatcgagagaagccgaatgctagacagcccttcctcagaaggaccacgcagcagcttggcaccgaagacgtcttcaacagaatgcatggaaatatcgtcgcggaaatccaagcccgagtctaaagctgcacaaggagcattgacgggggagtaaaccgtacaatcactcatggtaacatcgagatcatccatggtcccatcagaaacactcatggtcacatcagggtcagtcaaggccccatcaatatcactcgaggtcccatcataatcactcaaggacatattggaatcactcgaggccatgtcagaatcactcgaggtcccatcagaatcacttgaggccatatcaggatcagtcaaggtccgatcagaatcactcgaattagaatcactcgagatcccatcagaatcactccagatcccatcatgatcactaagttcttcgtcgctcgaaggatcttcccggctctgtgcccagagcgcattgattgatccgacatccaggttgggagaagacatgattggggaatcagaaaggatgaaatgtcaaaggatgcgtgagacgcgtttgttggtgggtttgacaaagtgtttagaagacaaaaccctcgaaagaggacgcaaggcagtagataatacgccgaaaatacaacgctgcaggggggcttctcttggtaaacgaagcgtatgaaccgtagatagaaaatatgaggagtgacagctggcggggaatggtgaacgagaataagcgagacaggcaagtcggtaagccgataggcagagtagcagccctcacaaggtcacaaggtcggtatcgataaacagctcttgcttgtgctcgtgctcgtaaaccccacaactccgtggatatatgagagaaggcacgaccatcctgccaattatcctaggcctaggaaccttgagatcgatcttggttttcaacacagtatccttcagcgatctaacgtcaaagcttcgaaattggcagtaccagtttcaaaggaccagacatctcgagtgttgaagttctgtttctcgacgtcaagatgtgcgtatttcaacaacccaacaatgtaagtctgaaaggcccagctagaccatgacaggacatcaaacgggtttttagatccaatattgaccctcgctattgatcggagaggacaagaatgagatgtcgttattccagcaaatgagtacattcgcaaaccagtgatatgttgcaagtccagccggaccgtctgtagacatcatgattgccaacctgaaaggcaggttcgaacttcgcaggacttcttcctatcggactcggggaatcgaggtggccccggccctatcctcagagactatgtgtttgcgccacgcaagtatgctatgtcgcaaaggcagtcgacagtcacaatatgtttagaggccttcgaagcctgatcgggcaataagatcgatatattcgagagccagaaagatcgggagatggaaaaacctcagcaagatgaaccagatatcagggactcacctgttgtatctcctgccgatacttcgggtttcgatcggagctcatgatgggtggtggtaaccctaccaaagagaatttcttcgattatcaagatgagggttacactagtattctagcgtgagtgaatgttcttcgattgattgaagacaagtgagagatgaagaggagatgaagctctggacgttcacacaagcacagggcgatctggggacgataagcgataaccggatgttctttgatccggcatcttttatccggcggtggcggagtattctgccggcatgcggggcacggctgtttttttacctaactgcttgttatacagtgagattcattgtattctgctcaattgcatagcctgagatcttattgtcaggatgctctatctagttggactcggcctcgccgatgagacggatatcaccgtccgcggtctagagatcgtcaagcgggccgagagagtctatctagaggcttacacgagtattcttcttgtcgataaggaaaaattggtgagttgagctccaagtctttactttgaatcccatatgccaatgagtcaatctatatctttcgcgcagatggactgattaaacataataccagtaggaagcgttttatggccgttccgtcatcgaggcagaccgtgaactagtcgagactggcagtaatgacatcctcgccggcggcgacaaagccgatattgtgttcctggtagtgggagacccattcgggtacggtcttgatacatctcccctacaagatctctagctaaaacataccaccaacagcgcaacaacgcatactgaccttgtcctccgcgcgcgcgaacttggaatcgagaccagagtcgtcccgaacgcctccatcatgtccggaattggctgcacggggctccagctgtacaacttcggacaaacagtcagcatggttttcttcaccgagacctggaagccgtcatcgtactacgatcgtgtgcgcgagaacgtgcagaccggcctacacacactagtcctgctcgatattaaagtcaaggagcagtcactggagaatatggcgcgcggacgccgcattttcgagcccccgcgctacatgactgttgcacaatgtgcggcacaaatgttggagacggaggaggagcggaaggagggtgtctatgggccggatagtttggctgttggtgcggcgcgtgttggtgctgctaatcagaagcttgtttctggtacgcttaaggaattgtctactgttgagatgggcgcgccgttgcacagtcttgttcttcttggtcggaggacgcacgatcttgagagggactatattcgcgaatatgcggtcaataaggagacttttgatgcgagctatgtcaagggatatggggctagcttgtaagttacttctgtggagatatgagaatattaaaatacatgataagatccttttaaaatgtggactgatttacttgatataatacaccgaggttgttgaaggacaaaggttggaaagattgtatatggtatattggccttcattcaatttgatcctgcgaggaccagccgaccagagcagtgtctggatttttctattttaaaataggaagacaaatgaaaatgccgcaatataacgaaagatgcaaagcaaatggtatccaagaaacaaaaacgaaaaacagatgcgaggcataatatcaaaaagaccccaaccgacaccttatatgcaaaatgttgaagcaatgtacaactcaactctcgagaaaaaagacaggcttatatcgtatcacatcagatgtcttcttcctcaccaggaagaagaatctcatgtccagaaccttcatatacaaagatagccgcaagacagccaaacacggatactaaggcaatcatccaccaggcgaagccgatcatgccaatatccagaccatatccgtaccacgcgcctgaaaatataggtccaatggtacggaaggctgacgatacggactggccaattccgtgaattgtgccgaggacggatgggtgtggcgagcaattattcaacaggataatagaggtgggaagagtaaaggttcgggcagtgacctggaagaagaggacgatgatgatccagaaccagacccaggggccgttggcttggccaggagggggagttgtagacggagccagtgagatatagggagcaatgaagtatgcgatcgggaagagggcgaggaaatactggtagctcttggctgctcccagacggccattgatagtaggatatatggtgaattggaggaccataccaattacacccaaaatggcggtcgcaaagccaacgctctgcggcagcatgcccagtccgccggtgaaggcgaatggcaagctccgtgcggggctcgcggggtcattggaatcatagcggggggtagataagaagagtagccagaggttgttgaaggcacccatctggaagtcgaagaaagcctgtgcgcccagtgtgcacaacacgttcttggtccagattcttcggaaaggcagggcacgttggagacgggcaggcttgtgcgctttttcttcgagctcgtagctttctgagcgatccgtgggccggtctagcaaaggcccgtcctcttcgtagtcgccgtgcggaagccttgtgtataaggatgatgaagaggggaccactctcctcacgccgcgcgcaaacatcttcttcgcaaatgcacccaggccaggcttgcccttgcaagatgccaaggtctcttctaatccatacgcaaccaaagctgcagttgaagagaggaaacagaagtttgcgaacattggcagggcgtacgggtacgtctcgagccattgcactccgttcgcacctccaaaggaagaattgggcccaaaaagacgagggtagctcttaacgggatcagccaacatgccacccatcactgcgaaactggttagcaaattgtcgcatggccgcgaacagcattgacagaatgaggtactcaccaggaccaaataacgaagctatgttgaacccaataggcaaaatcaagaaagcgcgtgagtgatatttcttctccttgacattctccgcgatcatagttcgaatgataccaacggtgccgttgatgccgccaccaaacgagcgccagaacacggcctgcgcgaacgacgtcgaataggcgacacccaaacaagacatagcagtgccaatcagaccaacaagcagaacaaactttcggccgccccactcagcatcggcaacacgaccccaagggatcgccgtcgcaaactgagcagcggtaaaagcaccctggagaattcccgcctgggtcgcaacatccgagtcggagaggttcgggtcaaaggacttgagctgatagaacatataggcctgcagcgaagcgatctgcaagaagtcaaagacacggcagagccccaacaacgccaattgaccctttcgcggcagcgacatccatgttacgagcgcagggcgcgctggcgcggacacagtcgggagctcattctcctgcacggtcagtacctgtggcaggccatggctgatagagcggccgcgcacatgctgtgcttttcgatcaccatttaaatccatcgaggtattccttagcatgttatcatcgaagacgggcgagtcgagcgagtcgtgggaggaatattcttcaacgctggcgagggaggtattggactcgcgtcggcggcggcctgtggtgttttcgggttccccggtgccctgggtgaaatggaagccactcgaccaggatgtcgtacgcgcgtggcgggcattattcgttttatgatttccagtcctagtcattgaggaatgcactagtgtaaagcgcggcgccgtaacgatcaaaggcctcggttccacgtatttttcgtggtttgggttccgtagttgttgatattaattatgattggctatgatagagagaatggaaagaagagaaaactggaagacttgtatttttttattttacttcgatttctcctatgttattgcgatgacgttttttctcggttcctaattgaggcccaccagccggagaatgccgttacaactttgtacacaataaagaactttatttttatattgaacataacatttaaatcaaatcccttaatataaaatccataagttgtatgatagatcgacaacgacgggcttgcgacgaccgctccacacctccctgccgattgacgacggaagtcttggcgttaaggaggagaacgttttgaacagttagttgctttacagtactttacaatacatcaatacaaaaaaacaattaataaccgtggtcctaccgcggttctaccatggtacaggatagagttcaagcgtatcagccacatccacgtttgtggagccgctttgatacaccacgtacaggtgatacaaatgtatacttcagtcctgccacagcatacttaaccctacaaggcgaagctaggagttgataacctatatacattgtatcccacgccacatacatgtatgtactagccaaattaacaatcctaacaaggtcgtattgtatctctacaaagcagtcgtattcggatcaatgcccagcgcgaaaccaactccgcctccctccggaggtatacgtatacccaggtgcgtagtatgtaactacaataaatgaattagtcatcccgccttcttccaaccttggttgaagtcccgatctcgggaggggcgcagggaagtgccacgcccgctcggtgactccatccttgtggataactcacggacattgcgaagtcttgatgcttggactccttctatagctccgtatactgtttcaagcgatattcaattcagtgtatgctttatcagtgcatcactcgttcctctcattcgttttactaaaaaaaggactcgacacataaaacggccgttctacaggcgtctcatcatgatcactctctccactcctcttggggcccaaaagcgactgcattcgcgcccgaaacatctcattctgagccaacttaccaacaggttttactatatcccattccctatccataaaccttgcatcgggctccccttcatacgtcgactccggaccatctatccacgtcgttccctcctgaaaacacgcgtctttcatttcctccgaactcctattgatcatactcttccagaatcccccttccccagaagaaacaacaccagcatgctcaagcatttcaacagtgccagcgacccagtcttggcaattcccaaccccgaactcggggatatttgactcgtcgttcccaaattccgagagcaggctagcagcttgttggctctgctcagaagagagggaagcaaactcgtagcgacctttcaaaatcgggtcttccagtggctgtgtccgcggatcgtagatgaagtcttcgtcggtggggttgcgtatatggtgcatttcgcaggtggaggagccgtgcttgtagatggcgattcccatgtgggaggggccatcgctgagtttggcgtcgccgcggccgtagatgtttgctgaaaggccgtacatggaggataccatgattaacactggtagagtaaagggagtatgtagttgtcacatgtagttaaatgtccccttccccacaccgctccagatctacatccgcccgagagatcggcggtagttaggcaactccgatttattggtgataagagcctcatggcgtgccccggcgcgtattcaggtgtcaaagctgaaagaaatggaaatataaatagatatccttcgtacgctggttccattggtttagcatggacacctgggcatcaatattgaagtgactaggccccatggggccccgcacggctcaaaacatcaacaagctcgatatcactttctcccaagcaagaatacagtaaccattcgattctatatacggcatttaggtctttgatagacctacagtcgaaatttctgatgccaatttgaatgacagcctttcatcctccttttagtatgcctcatattgacaatgtttgtttcattggagaaaacaacttcgctggctagtcggtttcaggatgctcttccttcgattttgaaaaagtcccgccatactgagatatggggtgttgatttgaagcacgcggaatggcaggtgctggaggtggtcttagaaaaggtactctgattatgggcgcactagcacaccgagatttgtcactaaatcataaatagttcctcagatgccattccgcaatccttgcacttcaactctctagagcaagtgcctcactcgagaagactttagaatggagaagcctctctgacccgagagctctccttactgaagcagagactatccttcctgacttggatctatgccatattactttgaatgagggtcaatatgtgctgtggattaatattgacgagatggcgattaagagatactcaataatacacgcaagcctgacgacatctggattcttggtgcagttgggtcttgctgtaatgcaaaagctctccgtgcttctgatgcatgcagccgctagttctgatctacatgactattcggcttcctgtgtggttgaatttaagatacatgccattcaaaacaccaagagaggacagcagtccttccaggggaagatcagcaatgccattgaggaattggtgacattcattcggtgtcactatcctaagattctgggaaaggcatacatcatcaaacctcgtgatgaataccttgcaactcttgatatcaatgaatctctattgagagatacggtacttttggaaaatccagaggaccttgctcgatatcttggctcacaactcccacctcgatatggcggtactggggaatcgctcgcggaatgtgacattcttcctagttgcagccttgcggaggatccaacagggaacaacgacctcaagacaccagataccagtgcggcagccagtactgacatggagaagaccggcgtgaaagaagaaactacagcttccgctatgaataccggcagcacttctccccatggcttgaaaatagaggagcaaaaacctcgcttaatttactccgacatcattgaaccgccatctatcatactcgaccccgaagacttgcccaaagcaaccaacctttgtcccgacaaaatgggcgcgcgtgttcttttcgcagattcagacacagttgcgaaattcagccatggtgtccgcctagctgaagccgaagcgttacacctagcatctacccgcacgaccatagcaacaccaaagcttctcagtgcatatatcctcgatggcgtcggatacataataatgtcatatgaagtgggcgaaccactcaacaaatactgggaccgtgttccgaaaaccgagcaagatcgcgtcctagagcagttacgggactgcgtgaaccagatgcgggagattcccggcgatttcatcggtggggttgacggatcaccttgtcgggatggcgtcttcgaggccggctacggcgactacactagctacagccacggcccgtacccatccgaggaaagctttgacgagggaatgattcaagctttgcgagatcgtatgccctttaaagtgctccagggtgaacatgacgtcgaatcgagctttttcaacagcgagtacatgctgtatcagacggtccgaggtatcaaaaatcacaagatcgtgtttacgcatggggacttgcatgccgggaatatacttgttcgggctgatggcactgttgttctattagactggggcctggctggtttctggccggagtattgggagttctaccgtgtcatccatcattcaccctggagaccctcgtgggatcgtatggtggagatattcatcccacctttttatgttgagtatagcgtcatgaagaggatattcgcgaccgcgtggaactaatgcagggaatagtccgctgctttttgagaattacatgaatataatactccgtacagaattattattgtaaaaatattaaattgaattaatatcaagaagtttctgccgagcgaacaccggcgcgaaaaaagccacttcgatacatcgccatacatcacgtacgatacaaacgtatacgcggccttccacctgcatactttaatcgatatagaggtggaatatataattctcatactacataagcctatagaagtagtcatatcgtgcttgtgctatatctgcaccagctaggctaaccacaaatacaacgaggtcgtattattcacaaagcaatcaatacgaaggaagaatacccatcgcgaaagtaagcagctccgcctcgatccggaggtacgtatgcccaatgcgtatgtacaataggtgcggatttttcggatacacgaattatattactcggtggaaacgtctacgggcccatcatagacttctagatctatatcatagatacacgatgtaacaggatttttttcctatttgggtggctgatacgagatataatgcgtatagcgatcagtctatggatatatgttatggtagtatgtatgtacagcgccgagtaactagctagcatctagaacgcaaaaaagaagcaagaaataaagatacaagaacgaggagtcactattcgatccgctctcgttcacgcctatggccgtatagactccgctcaacgagcgggaaataggaagttgtttcgtcctctccgacccatcgacgccaattccaccagcggaggtcggtggcttgcacaggcgggtgtttccgctcagccgtaccgtccacaggcgtagacgattcctgatcccgcagctgggtgagcgaatgtctggtataatatcgatgtgcgaggaagattccggcgaagagggggatcgccacgaggagaacggcaccccaggcaagtaggcctgtgaaaatgtcagttttgcttgtcttcctggaagaatagaaagcatgttcaggatatacttacggccattcctccaccggtctgagtactttggagttccagccgggcctgcatagcccgatggatgtgtataaatattggagcccgggttgttagggtcaatccatggcacggtattgacacctactggcggaatgaaaggacgagctgcctcttcgccggggaacccataccccggtgcgtccaagcaggtagattcggcgcaaaattcgcgcagctcggacgagggcacgaaggtatacttggtttcggactttccgagcaaaatgccctcgcgatccactgcctcgaccttagaccagaggtagaacttgggggtggagtatttggtctcgaagccggttttggaaacctcgtccagcaaggtccaaggtccagtggcgttcatcgctccccaaaatcgccaggtctggacgcgggttgcgccgttccaactaacatagaagctggtggtcgatgatgtctccgcgcttcgggagtatgtccatagggcaggagagtctgtcggtgcaccgtcccattcaaacttcattgcgcggtagttcatcacggtgtctttggcgaaagagccccagaacagtagattgcccgcctcgtcgtgctcggatacaaatgggttgtttccccatccgatgaacgcgttttggttggggagcatctgtaggtttccctggctggagctcactagatcgtctcggattggagcgtagtcgcggagctgggtagccgttttttccacgtggtcaatcatgatgatcatgcccgctgaataggtatgtgtcttgttgaagccgttgtagccattgttgtagagtgagagcagtgtatgcgtagcattctcatacaaccaccgggcgtcatgttgctgcgaaaagctaaaattgatattccggaaagagggctgcgcgccgtgaagccgccacatcaccgagccgtccttaccggaaaccttgtagatggccgaagtatgccgcgacgaaattaaatagtcgccggccgcatttttgtcgacagagttgatatggaagtaatcccacggttcatgcacattcaatcccgtcccagaagtatccgtatgagccggccatgtatagctcgaggatggatcgacatggtcgagagaccgccattcaaacagcacgtcgttggtctccacgtcgatctcctggaaaacactctccatgagccatcctacaccagttttgacgttccacggtgtcatgtcgaattgccgttgttggtaaatggtcatgagagcggtcttgccgtcattgatgggacggaattcgtgcatgtcgctcgaggccattcctccgcccggctgaactgatcgcacaacccggtagttgttatccatgatgattccatgtccgcggcagtatcccttttgctggttgccctggaagaaacataggtggtcggcgcctttatacttgcacacgtggagtccatgggcgtttcccggccctgaaatcccccaaccactccatactaattcctatgatcgattgatgggttagcttctccatgatggacgaatctgaaccccaagaacaaagacctacccctgtgttatcgtagatgtatgggccggggttttgaagttcatatggtgtgataaagatgtagcccgggctgagcttgtctggattggtcctctcgatattgaagacgggcgggtatatgtcgggtctctgttgtaccgatattagagagcaagcacactcgggtcaagctaatttcactaaccgatttgtaaaaagaggtatcctctcccagtgtacagtcaatcgcgcataaccagagaatgccaagaaagaatagcgacggcgcagtccctaaagaggaaaatagggaggtgcccatggatccttcgcaccacttcccgatgcaagatagaaacactgaagaatatcacccaaaaaaatatctgtaagggaggttatactgaaagcaaatcatttagaagcatagaagaatattccacccaggccaagaggcccaaggtgaacgaacagtgtgtacgaatccctctccacctgtcaatgcatgcttttcgcatatctagtggggcctaagttgtgttgatcgtcgacgttcattggtcaattgtcatttaaagctagacaaagatgcttagtcagcggcaatccggccatcgctgcccagtcaaagttgtctcagttgctgaagttgcgggggaagtctatacgagcggaatcaaggttaacaatccgctctgtgaacaggatattctccctcaaaaggcttgattgtctaactcggttgttgttttctttcccaaatacgtgtaacttagatagtgtgacggtacggtatctctcaggagccgcgtcatgggcgatgtggcagccgctaagcagcccctaataccataactccgagatcgtatctattccgtaagctgaatgtccgagagcaattataattcacgggtccgtcaaaggttcgtgaagaaccatgtaacgtgtctcggagatacgcagtcacccgccagccacactcagacagacagctcaatccggagacgagttaacctgttcgggagatgcaaccaatggatcgggcttctacgattccaggcgctccgatcgagctaaaagctaaaagccacgtgcatgtggcattatttgttgcgtacgccggtagattgaaagtgggggattggttcagggacggcggtggcgcatggtgcgtcgtcagagcatacgcgggctgttgttgcagcatctattctggtccgtacggcgtacacgtgcattggatttggacctacagtttggccttgtgcataatttagtgtccgtaattggaggtagacatcggacgatatggatactgtcgtaccagacaccatatgttgattgatttacgagcccgtgtgtgagattctccagggacatcttattttgcacgaagtagatcattcaacattaagagctacagcggatagataagacattagatgaaaagggatcttatactcctttcggcgtacccaccagagctaagaggacctatcaggtgtccacgaccacagctaagatacagacctttctttctctcatatgctgtgccaaacagggttcaaatccaagaacaccagtccaagcccgaatagtagtctcaaatatccaggcccggacgaactcctcaatcccaaaataacgagcaacgaacccatcagccactaagtccacgtataccactccgtctatattacgtacatccgtcaaagcttttaattcaagccttctaggggatccactccggcgcctagaatgaaagaagcaatctaagccccgcttgtttcgtatcgaatagagagaagcagttccacgttgtatcagatgattgtttcccttacaaggatataacaggagataacaatacgtgtaactttcaatgtttggaacgcaggttcacgtaattaatacccctttcgcccactgccaagccgctaaccagggaaactccacggcacttctccaataaggtgtggctggtacatttcctctggtttcgtacgagtacgaggtggaaggcttggggctgagtgtcgatggttgggtgtttatttatttgaagcggttgctatgtgtacatgcaagattgtcgttatgagcatacttctattctcaaggtttattgtatgtagcgaaacgtcaaagtattgattcgtatatatttcgcacgcttttgtcggtttgactttaataacaattcaatggcgccttgcatcgaccgattcatgaaaagtaaggcttcacgtagccaaaactctaggagccccttgcctctaggcaatgcatgatgataacagagcctcggggaagcgggtacttggtgtttatccctcgatttgaaagcgggggtgctatgatgcgcttgtacagagtatgcataagaaatgatggtagaaatagaaatatatactgttacattaccggattgttctccaaaacgcccctgtaaatggcaaaacaagagatcagagatgatagatgcatggtctgttccaacaagaaggatgacagagaaaaaaaaagccacggggtctgacgtactagcggcgcctgcgcgcactagcagccagcagagaaagtgagacgtggggaatatgagaaaaagaaaaaagatgcaagacaagaattttagcgaggggagaaacgcttgaaagccaaagtagcagcaaggccagcggcaagcagcgaaccaccaacagtgacggcctggagggcaacgttcatcatctggtgacggttgcgggtgctgcagcgcttgtagaagtcggccatgtcgttgccgcgggggaagggggtgtcaggaacctcctcctcgaggaactcgcagagcggggcccagccgtcgttgatgttgtattcgagcagacgctcggggggaaccaggctgcggacctgggcaacgtgatcctcgtagacttgcttgcccttgcccgggaagtcaccgcggaagaatgtctcaaagaacttgttcagcatagggtagtacatgccagcggcccagctgaagttcgacacgaacttgtgctctgggtctgagacacgccagaagacagtcttcatgacggagctgtggtttgttagtatcttgttcttagatcagaaacacagtgtataaaatgtgacttacgcatgccatgggtccacgtcacgggtagtcagaatgaccttcgcattgggataggcctcgatcagctccttcgcaaaggcacaggcaggccagtcacagacggcttggcagtcacccaggagctggtcccattctttgcggccgaactcgccgactccgtcgtacttcgcgttcagggcatcgtgccacatcaagcagtccggcgggttctcaacacttgcgcacatcatgtggtagcacttgccatagcccaggcgctcaaaagccttgcggagagctgtgaaataataattagtttgtatgttctgttcccatcggacccggtatatacactaatatacaccaagtccaacgcaacacagcacctcatacttacaggcagttccggtacggccaacacccagagccaggaccttcataggcacagtgcggtggcatttccggcggttaatgtttgtatcattggtgaagacgtcggtaatgggctggggagccagattatcggagagcatgagagacatggtgggtgtttatcagctcaatcgcaattcgatatagtttggaagtgtatagagacagaataagtagatgatataaacgaaagaagtaataaagccggacaaagaagggacaatatgtatggaaaaagtctagaaggaaggggggttataagagattgatatggagataaggggaagagtagaataaattaaaaaacaaaaattaaaaaaaagatcctaaaaaaagaatccagactccggaacaactgatcctcagggagatcgaatagaacaatgaagtgtactccgtagtgggcattcggcagtggcagtgccaatgacgaggctcaaaccatagtccctaagtacgatgtgtgtatgcctccccgcgagtggcaacgttcctatccgctatgtccgagtcttggctttgggtccttcattcctgatatccgattgtgccccgtttggaccggtggattccataaaaccaaagggcccacgagggtctacaaggtatgttgtacattgaaagtcattgtatgttgtattgcactgaggcgcgtatacaacatagacacgacgtcacaggctgacgcacagggatgtcacggatagtcaggggtgttttgtggagtcgtgtatggtattgtatgtattgtacagttcgtatggtaaaagtccgagtgcaaaaaaggccagggttttggtaaaatgaaaattaccaaaagaattgttccttcctgttgccaagactcatccacgtacgcttcgaaatccggaatattctttgatcagtcacgtcgctcggcaaaatcgacgatccatagtgccggttggtggagcactaaatgggaacgcgtacaccctcaacttcggcgagtgcggatttctgaatgaggccgtgaaggttcgaatgcaccacatacattgtaggctcatagatcatcgtagactcatctactatgtatgtataagcctgcaatgttgagttgctagttgtcatatcatacccagcacaccacagtggcagtgacccgaattgtgtctgccaagcttggcccacaatatcccaagcaagtcaatctctcagctgtcccgcccaggggaatatcgttccgagtacgagaacctggcacccccgctccatcgggttggttgcattgtattcggctcattcgagactgcagttgtgcgtttcacatgtcaagcgtaagtgaaagtttcaagtcgtctcctggatcgtccggtcactttgcctatcacggaaaagaccatctgctcgatgtgtcgccgtcccaaagctgttatctcccaagtaccgatcaggcaagttgccttggggtgttgaaaacaaagttccacccgattttcattgccagggataattgtccggtgtgtacggagtattgtgtgaggattcccggttctgttgtcacgcatcagtactgtcatagcggccgaactgatcgtcccgtgttgttgaggtattttccactcggggaaggtatcccctcgtggaccctggctttgtcgtgtgcccaacaaaattgagcagatgtctgtgaggcagttaagatgatatcatagtcagcctatgatggagagtgatagtgatagtgatgttccagagaaaccatcgtcatatacataatgcctataacatgcatgctaaaggcagattatggtagattctttgcggccagttgaagtaaaaacgcagaaagggaaaagaccctttcgaaagggtcaacagcgagagagcttcttaaatgtgctatgccaagacccttagactcacgctcgcaatcgaagctataatcacatcaccaagccacgaccgattgggaagcccctccacacagattacaatctaatctaagcttaaagccctaggttagttcattaagtcaattttgtgcaggccgtctccgtcaggcattaacggcagagttttcggcaaccagtgacacattgtattccaaactatgagtgggttcccttgaccgaaggacttggcagtagcagagagactgagctacccgtcacacctcatggatgttatatccacataagcttcgcatggatagttatgtctcagcttgagttatacgctagtagtagattagatcataatcagaaatacatactcactcgggacatcgtatgagaatatgagaatatgtgatctcgcatcttagctggcatctggatatgtttctgtggtcttgtatagcactataaagagcacatattcaactatgttcgattacattcagctcatagttccatagtgccgcttaatgtccaatactacatactccatagcccagctggcacgaggatagcgtgcgatacttctactttcgacgctggggtaccccatgcttccccacgattggtgtttttgccactttggtctttttttagtatgttctctgataaagaccgctttatttcatatattcggaggggaaaagaacctcatatactttgtctaaattgtgtaacccttgaagagtagcccctgcgtgttttgcatctaggaaacttaatgtatcctacccgaagaatatcctttgaaagatttcacccgcgatgagcagaaagaccagagaaaacttgatgcagcgtactcatatgaccatgatttcgacattggtccctaagtggtggcatgaactataccgatgatttgatatctccagaataaccccccaaatatgaacgtgaacagcactaatattgtctgaaagccaccgatacacctgaaactccatgcaaatgactgttttgctttgattgtccaatgcagtcgggtccgtaatcggcaacggtcctataccgtccccgaatccaagtatcacggctcgcttctactccaatttatccaggtgttccaatcgcgtgagaacaacctgcttgcttgtctcttgaatctcgcccgcgagaaatacttcatccaggatagcgtagacctataaatccggcacacgtggtcagtatcacagctcatgcaactccgatctcacacatgccgagcagtgcattcgtcccggcgacttgcacgtaccttgtagaaattgaagaccaaatccagttcgcacacattgccgaagaactggtccagcacttcgacgaagaaatgaatggcctcgagataggctagctcgttgtcgttcgcatcgacgcagacgcaaaagaacaagccggcatatcttcggtagacgaccttggtactccggcggaactcaacaaagttggactgatatttctgatctcggggggcgacgaggcgatggacctgaacggttgtcggttattagttggatgggaactcggagtaagtgcgggtgcgggtggtattgcaattgcgacgaacctcgcctttcagtttgactttctcttcatcctgtagcccagtgtcagctcaaagtcccaatttcataccgactgatggattctggcaacactcacactgtacggtgaataccatttcgccaggcgcgttttccccctataccgtcattagtgtcgaaattgaaaatgacccgcgcggacaccactcactggcgattctgaaccaggataaaggagaggaccattgttatagaaagccaggatgttacctggtcagcatttatgaaaccactcggagggagtgttgcgacaagctttggatggtctccgctgctcccgttatcgaagctcccctctcatcttgcccggactcaccgcctagatggattctatcaggtgaaagcagggcatggagaattacagcagactattctactaatcctcaagcaatttagttcccataagacattcaatgcatcaactcaactagtataacaatatttgcaaaacatagagtatcaacagacataaagcgtagaattcgttaacagctcccatgacagcccggtgtaacatgtgacaatgagtgacactgcacagtgacggaataagatattctggtttgccatgttccatagcgcccagcagccctcaccccgagctcattcgattgaaaaacctcgtcagacgagtctagaaatactccattagcaaccaagtaatgtagcagtaagaccaagagcaagtccacgaaagaaaaaaaccacataccgtatagctctgtggcctaggaggctctttcggactacccttctgactctgcgcttggctctgagcctgactctgagcctgactctggcgccgagtctggttctcatcctcagactcatcttcagacccgtaatcctcctccgaatcaggataccaccgttccggatccccattgtagacaagataccagccgattttctcaccgggggcgaggcgatcgcgcaattcctccagcgccgccatctggtcgtccgtcaacccagagccctgttccacgcaatcgatattctctccggcgccaccaccacccccgtcctccggcatctccaggacccgcgttgaaatatacgcatggtcctggctgacggtgccactcgtctcgtcggccgggtcatactgctcgataaacgacagctccggcagccgggtcaccaggtccgcctgtgttttgtggaaggattctgcgataagttcggtcgtcagcggttgctggatgtattccgctgctgcttcttctaggttgtggagtacgatgtatacgcggatccccgtgaacccggcgcggggccagcggaagccgtggagcatatagactggcatgatatccgggtcttttcttgggagccttgtttcggggttcgggagggttatcgcggtatctagcgaccgctagctggggaggattgtcagatttgcaggggattcggagttcatattaagtctgtgtcatggcgggtggtctatcgacgcgattgggttttgcgggtcccgtgcgtttcaacgggagttccgatttgtactgctttaatgcctccaatgaatgcgtgggattcgagattaaatctatgctcgtgtttcattggattttaggtgataaccccgaaacccacaggtctggagaagatcgtgccttgcttctatcacgtgtcatattattagttggcagtagaggctcttggatgctctctattatacccaattactgcattcacaaagcagaatgtgctattccaattattctctcggattcgtttttctctcaatgttggaaatacgaactcccaacctccgagttccgcagaatatgacaggtcatattcggggaaccgcttgatctaatttaaaatctgtgacttgtcgagccagtcaattgcagtcaaagcgaatcgttaaaataggacatttgattcattatgcagggctagaatcaaaacgttcgacctagcgaagccctgtctaaggcactgaaaaggaaaccgacatgaaaaatggctaaaatcaagacgctgagtgccgagttctggtgaatatcgagatagctcctcaatcatggtctcctcttcaaatccgcaaatctccgtgtcaattcatccagctcgggtatcccattgttgttactattgctcttggaggcaccgtcctcccttgagacagcagcggcttttccctctgtgccgggaagcttgactctgggattgggattgtctgtcctgggagctggcggcgcaacgctgacaggacttcggcccgcagtgagtccacgtggaggcgtagctttggtcaattcactggtctccgaggcacgtctcgcttcagccaagttcggcctcagcgccgagtccccttgctgcttgccaggagtttgcggtaattggggttcctctgcatcaccatcgtcaccatcaccaaggtcatcaacaaattctggcggcgcacttcccaactcttcttctgccccatgccactcaacgtggtacgctttcgcaatctctcgaaggtaactctcaacaagatcccgtcctggtgggcgcacacgcaagcccttgagaagccggtccggaaccttgacagtatcgatcttattatcttgcgctagagtcataaactccttgccgtatcgctcgcccagcatagtacgaagcatagtgaattcgcgcacctcgtgcgggaagcgatgccacgcgtagaataccacagtagcagcctcgtcaagcgcagtatcgaggtaggggttatcgtcatccgcaagcccatcaccagagtcatccgccggactaccagatcctgtgataggcgcagcccgctcagcctccttcttttgcgctcctccacccagccaagagaacccgaatatcgagccagtgctttccccagcgcccttgacgcctgcagtggttgataccgtagcaccggcttgttcttgggtgcgcttcttgagcaattccttggcgcgaagtctggcgcgggtcccttggtcgctgaaggccatctgatccaacacgtttgcgcgcgcaagcagcaactcacagtagagctcgaccatctccattacctctactgcgatatccgttgcaatgacattttcgactcggatgcgcgctgatgcatcgcggccttcgctgaggagctgggagagttcacggcgttggacgactgaggaggctgtatctttcttctgtaggagacggagacgaggaataagcaggcggagggtggaaactagtctggtctttgattccattgtgtcagttatttggtttctgtcagacgcgcttaggagttgcagcaggcaggcgttatatgggcagtgcggggtagtcttgggagctctaggtagcgatattttggggaagtgccccggccatgaaatgcatatgcgaaagaagaagaaaagtaagtgagatcatgatgacttactgtttgcgccgagggaggcattttggcgtggtaacttgttgaagagaagatgaggggggaaatggagcccgatggggccgagagaccttggggtcaccactactccatcgggttaccctttgttttctcacagtcgaaacttgaagaatccaccaaattaaaccaatgcaatataacctgttaattaggcatttgatgtgttctcggtgtttcaaggagttctgggaggtccgcccactcccaaggtcagcctcggcttgacctacagttctaccgcaaaagttgtacaaagttgcctacatagttcattcaacttgacaacatgtggctggttccccaattcctgaaaaacctctggtgtaggggttcaaacgaatatcctgtctttcccccgccagagcccgaagaactcctcgctcgccctaatgtctaccgcgaacgcctcttccaacgcatctatcgaactcctaaagacaagctggaagacaccccactgttttcactataccgactctatgagagcttggttttgaacgacaacatcggcctgcgaaacgaattcgaatatttctggtacgcgaagtggccggtcgtttctattcctgatccacaggacccctccaaatctcgctacgcggttctttctgctatcccagcctttttagtcgagtcatttaaccagcgtatcgagctgggtctcccacggaaagccgaccccatcatgtcccgcgaagaaatggagcagtaccaaaaggaggacaggatattcgagtcagcgccagagtggacggaccaggtggcgcggctcgaagataccctagtcattccacatgataacgaagagattcttgggtcgttcaatgataaaagggctagtgagcagctggcagcaaaaaacatcttgcattggcaaccacatattcatctcatttgaaggttgaacatgttggcctatgatttccgatgagttatgacgcgatgaattgttactctcatatatatttcgcttagtgaaaatcgataacaattgcacttttgtcctcgcttctcaacacacttggtgcaacggcggcattggcgacgagtgtttcttgcggtggctcagtgtttctccctatagtgatcttgctccatatggtctgtttgagagcccgaactatatcgtaactttcccatcgcatctgtagcccatttacaacgtccttgattccatcgtgctggatgacagcaacaccgaatgccccatggatatgtccacagacaaccatcttgggctttactctttgtatctcacgcaatagatacccatcccctttaaccttgatctttccatccggtcccttttcgctatcgcagtcaccatatagagctggagggccatgcaccaccagaatatcagtattatcggggatctgcccggtccgcacgtcacggattgaaggatactgaaaggcccaaaggccaaactccggcgtcattggagatccataaattttcacccggcgcacttgctgctccccggcagcgggcactggtatttccagcgtcactgcttcttcttgcaaataatgaatccccgtccaatccaattcctttcgcttcacagcactaattccctcgcgcgaaagaaacttcatctcgcttgcttcatcgaggataagatcatggtttcccgcgatgacaatcttatgggtgtgtggctgagaagacagccagtggagctgtgtttgcacctcgtcaaatgtgccatgggccgttaagtcacccgcgtggactagtatatctccgggtggcagaggaggggttgcattgtgcgtgtctgatatgcatattatgcggattggagggtgacttgggttatttggaagaggaattggtgttgtcgatggtttttgtcgtgcagactgcgtggctcctcggaataagatatcccagaggggctgtactaaacgctccagccatattggtggtcatgataagttgtatgggaagggaagtagatggttgttcatttggagttttcctccaactaaccccctacaacgttgaccaaatgagggggataattaatgattctaaagttccccgtgtcacgcgcggcgcatgtgaactaactagttacgtcatcgtatcagaagggcgaactgtaactatagaatatctattgtgagaacagcataattctcttgagcacatcgatgttcctaaagatagattgagggttggatcacgtctatcgtagaaaagacacctaaatattcacgaacccgacaagggagcatagaccaatcaagaggagatacatcatgaaacgcttatagtaccatatccctcttctcaccatcatcctaagtctaggctgatcacaagacagattaggaagagtagaaagcgaagcttctagagaaattgaagtggcgaagagagagacgataagggtatagatccgattagagtaggataggtagacgatgctcctttgattgatattgataatcattctgagcctattttgccaaataatggcacctgggtacggcccccaggcaggaagttgggcagtggagaacataaaagaatgaggcacctaatgcggctggtgtaacccatggggtatctaccacaagcttcaattgatggtaaagaaggttccttgatgcttgattctaccgatcaatgtctgctcaaaactgacgattcaatcggaggccatcataatcaagcaagcctcatatagaagtcaaaacaattatacttttatacactttattatgtgtgtcattctgtgcctgtggtctgtgattcttattcttcttagatcttagatcttagatatattatagagcgatttaggttatattcaatgtttagtatattatatcagaagacagtcacgacccaaacgaccaatatcaaatatccaccgcgacgatatctccaagccttcttcctggtcccaataatctttcataatctttgctgcattgacaacattcaaacatctcgtagcagtccaaaacttctctaacgattcaaccaggaagtctttctgggcgcgagaccgacattccaagcccgccacgaagatagcccacagaatacatttgaaaagcgcctcgtcatctttcaaaatatcaatcagacccaacagctcaaagactaaatcgtcctgcactgtgattgtttccgtcagtacatccagaatgcgtctcccatatatcaaagccccggttttgaaagcctgcgataatgtgcagagataattgattctttctggggcagactgtcgcagactcgaagcccaggcgtaactgtcaaagttttggatgagctccagcatcgcggtggtgtcttggatatgtgtttggagagcggcaccgtccggcagctgttctgcgatggcgtccctttccttggagagatattgtatcgccgacaacaggaactctggacatccaaggaaagattgctcgattttttcctgggattgcctttctgcttggccgttaaatatgaattctgacagtagttttggtcgtaaaaatgttgccccgagcgtctcgattctattttgtaatcagtcagtctctcgcatggctttataccactaggcctaatctaactcacaaatgaatctgattggagataaacccccggatctcctgtaccgtctgtccaggtccatcattgactccagcttgccactccagtagcggctggtaggatgtaatcaaactcttagcaccctcaagatggaaattccaaccttcactcccagattcgaggagatccagaaaaataaaaagaaatattctagcgacggttgtgtcgccttttcctattgttccgtcaccaagtacctgagagagagcttccatggcttggtgtttgaaaagtagcgcatcgcgattggcattaacgaggccaggagatgtaggaggttgatcttgatggaacgactggcctgtattagcatggtgccgcgccgcgagagcaagtatgcccttctgtaagaccgggtcgttcaatccaaaggagagcaagctccggaatggattcctggcgctgtcgtatacaatgaacaatttgcatatgtgtctgttatctaaatgcgatgtcagctattagtaccctagtgttagctgtttgcatgcggatcttacagtagtctatataatatttcgaagtttgatccaggcttgacatatgcggatcttgcaaggcagccggcagcatactaccttggaccagcgggcggggcgatgtatttggtgtcgatagcgcggaatcgatagttctaggagtttgcacaggagatccatctgatccatctgatatactctcgtacgaatggccttgcatctttccgcgaatcgcaacacccttgacccacctcagaggtctcttatcgaagcactccaggtcggctctttcgcacttggtgcatggtgttccagactggtcgcattgaatgcggcggttgcgacatgtccaacatggatatggcatagggaatgtgcaatgtggggaagaagggtatcagatactcgagtcgggagatatgaagccctggagataagacttgctgactgagcggacccgtggaccggctatccatggatccatccaaccacatacctgtcgacggcaattcttcgccatcacgacaatgtgtttgaacttgggtcttccaatgtatcaagttcatgaattcagcgcatagtatatgtctgtcattcctgctctttaagaagacaaagagaaataccaacagcacagaaaaagagactaaagagatccttcaaacgtcaagaggatattagagacgatctatataaagtacctagacccactgagaggctagtcatccctcataagtggctattcctttatattatgcctatatgaatattggctttctcttccacaaaacccagtgtatatagaatggccccgctatgtcccctctaattgataatctaaacccctttgaaggccacattgaaccatatagtaatagaccgctgaatcgaattctgctagttcagagcaatatgtcgcaagactcccagagtatttattcacaccacaccacgacgtccaaagacagtggggcttaacaagattagcaacggagagaccgagccatctgagacatgtaagacctaagcaaacagacttgcagcaacccccgtcctctcatccctcgaattgctgcaaccaatgcgggtccgacggcgcgcagagagagacaccaggcaccgtcgagccaatcaagcaccgcacaagcgaaatcggacccaaaaaaagcgagagcaagccactataggaaattagacctagacaattgaggtccgtccatgagaagagagtaagttctccggtcaaaattcccaaggccgtatatttagaacatttagtcttttgattggtcgatccaccagtcattcagctacgctgattggcccgctcggttcctgacatcattggcgtgggagtctgtcgccgctatacctatttaggaagaatatcacaactgtatggtcgattttagcaatcccttcgcgtttcagtattgcttagccgtagatgtgaggctttagcgtgcagggtatgcttacttatataactggcagagtttgcccactgaatgtagtctactgtttcctatctcatcccacaagaggtacttcgaatcgaccaacacgaagaatctgacattgacaccttccaccttctttgactacagtatgcgcctatctactctcatattatgccccttatggccaataactaacgagacactttctcctctgcagcctcttcaaaccacaatgcctaccatcccacccacgatagagacaacaatgacacaaacatccacaatcgatagcgctacaagcttgctcaagcgtagcagcatgagcaaccccgacaaataccccctctacatcttcctcatcctcgccggatgtattgtaggaggagtcatcgggttcagcatatactccatgtactacggcctcgacgattcaggcacgttcaaggacgtgggctacgagcaacgaaaatacatgcgcgagaccaggcagcggactatgaacatgctagctgttgaggcgaggagacctgatatgattgttcccgtcggggaattggatgcttgaattgcttgggtctggcgtttggggatgtctacatgaggaagggcctctagtagttaggtatggatggtttggttcgatggatattatatgtaagcaactggcaattatgatgtatgcacccgctatatatatcggaataaagacaggttcaatgtttgtgtatattcaattaaccaagtattccaaggacagtgggatgcttgacccgaaaaatcaaagcgaggacgaacgatgagagagcgctctgtataatcagcaaagatctgtctgagatctttaccctagtggtaagtattgacgaataaagaaaatgaacactgtctttcaatgtgcaatcaaaaagacctggttggttccagcttcaacaagctgtcacatgtgatcaaaacaaaccccctgcataccagaagcaataagagtaatattcaacaagctgaaaaagaagagcaatgccgtggagcaaagggatataaaagtcatgaagcagagtaggaaaaaaagtccaacgttgagcgtcgtcaagaaagggcatccgagggatgacaagaatcgtaaaaatggagattatgtagaagaagaattaaaatgtgaaagaatcgaacaatagatgcccgcgggtttaccgcaggcagatatagtgcagaagaatgccccaaggcagtgtttgtacacacccgtacatatatgcaatattgtactctcaatatagccgaatcagtcagcgctgatttagaaattcacgacaatggccgcaagcgcaccgaatgccagggtcaccatggagacagtggcactggtagcaccgccagtggcggaggatggggacgcagcagcggcggcagcggccgtcatggaggccgctttgatatcagcagaaccagtcagaacgtgcggctggtacgtatagcttagtgtcaggctcgagttgggtaggcgcgcgctggggctagtggcgctcatgataggagttgtggtggagatggagctagcagtagaggtggagatagcagtggaggtggagctagtaggggtggagctagtagtagaggtggagctagaggtcgaagtgggagtcgaggtcgaagtcgacgtaggagtagaggtggaggtaggggtgggtgtggatgtgggtgtgggagtctcagtggtgctagtactagtgctggtcggagtaggagtgggagtcgaggtgctgatgctggagctgctagtggaggtaggagtgctggtggaaacctcgatggtctcagacgaggtgctgccgttaccctccttctcgaagacgataatgtgcgcggtctcgcccttagggatggtcacgacgcaaccggtggcgccgccagcgccagtgaagggctgaccgatcatctcgttgacatcgttgacagcagggtcgatcttgcagggcaggccgttgcagccatcaccctcacactcaatctcgataccgaattcaggcttgactttgcggaaaggcgtggtgggttccaagtagatggggttccaaccgatcttcaggaaggtgttgccattctcgtcggtgttggcccctgcggtatacggggaccagttaccgacggggttctcggaggtaccccagacacatccttcctccgcggtgacaccaggagcgttaatatagtactgggcagcagtggagcaccagtaggacatgccgggcacggccaggtcggccagctcatcaaccatggtggggataagcatggcctcatttccaggcaacacagtctggcagaaagagacagactttccagccttattgtgggccttgagaacaccagtggccgactcacagtagtcgcggttggggaagggtttctggattttgccatcctcgtcacagtacagaccacccctcatggacatggggtacgagtaggacgtcgcatcgggatcccactgcatagacacctggccgggagggcaagcgtaggggcagtagttgccaggtttgcagggctcgtcggggctcatagcccaaccggcgttttgctcttgcggggtgatctcaaccaggccagcatcggtggggaactcgcactgtccactcctcttttccaaaacaacatcacgagtctcgtggtgatggctgtggccatggctatgtttggcggcttcagcgctcgcaatgagggcgacaagcgccgctgcacggaaggatgtgatctggaacttcattgcgttggggaaaagactcggcaaattgataatataaacgaatgtatgtatgaagcgagtggctaagtcaaacgagtgacaaaaagatacggccgatggccaagggcagacacagtgctcacagataatgaaggtcaagacaagcgaagggaaacagacggggaaagcaccaagaaaagggacacggcctctagggagtcccggctcaggtccacgagtgtgctaacctaataaggcgttagatctgggatgatgtgcgcgcaattccggtgcagagcagagcagccccgactttcataggcggctcgtccgtgattgaccataattcccataattgcgccctaaactggaaatatgggcgcagccttggacccccaaaatgctgtgcccctgaagcagactccactagtggacagccactagacacttagtgtcaggggcaatgatagcctgcagccaatgatgaacgccattaccccgatggttcctgcttggcagggggaagggccaataagctaagagatatgcattttgtggagttgtctctcgaactctttcaacggcaaaataaaagcaaaagataagtgttcaaatgaagaggtgaagaaaaggaggaaaaggcgtgcgcaacctttacctgagaaatcctgtcacatgacacctcaatatccacaacatacctgggtaactaaccaactaataaatgtggcatgagaaaaacccaaattaagtgaactcagactttaccgagtacatcgtacgttctgcacgagaagaagaaatatccaccgaaaccaatgaatgagttaatattcccaaaatgggaaatattgctcatttagcctagtacccgtcaatcccaatcaaacccaccatactacaccgttttaaacatgttgatcaacacaagtgggctctcttctctttgataggcatggaatcacatggccaagaaattcgaatccttagagcgtttgtcccggctgccaatgtgtcgctctgtggtttagacaaagcttgacctgggagagtatgggggttttcatggcaaagcaagcaattaacaagatcgccgctaagatcactttgatcaagggctccatgagacgctatgtccaagatccgccagagttgccagttgtaaagtgtgcattcactgcattgtgaggatgcccggtatcatccggaatatcaatgcaagaagcatggacctgattagtacgtgatgcaggtggatgtcggtatcttcgatggcttgggccaattatatcggattataaaagtcttccggttagttagttacgtcgtcaaagaccgagcgactcttctttgtacttcttcaaactgcgatttatatagcttagtacctagccctaagctgcggcgatccttgcggcgtctacaatcatctcctattgcaacgaatgctaagagtgaaaatcaagaacggcattgcgttgcgcatgataaacaggatgtcttttttgagtttgctgtaaggactgttgatgttcctcgcatggtgagtatccactcggcctatcacttggatttcgcggggccaagtgcatctgacaatatatgacagatcgcattgacacggccataccgttattttttttggtgtcttttgtgctgcttttcggaggatctttatactactttccaatggatttgggtgctaccattatgtggcttttataatgaaaaaaaaaaaacaggttcaacaatgccctagctattgcgacaatccaaataaatgaaagagtctagcaggtaactgccccagaaaatttctcagtcaccttttaatacaatccaggcttcctccttgtgtatagtcccatcgctgtagctaaatcttgcaatgcaactgaaagttaacctccctcattaaagcggcggcagcctaaataagaaagaagagggctacaacatacagcgatcccttattaagaatagaagaataactggtaattcgcccagtaggtttttctttcctccttggggattatttgaagctattcacactgctgacccaccttaacccccacccccacaataatcttatttctcttttacgtgtgtacatacagtcagactggagggaaggtatggaagatagaaaatgtaatttgctcttagatactgcatcgtgttggacagggctccttggcctaaagttattttggtttgtattttcagatatgcatcatgacctttcgttatagagctgcatcatcagacatcaaaaattcacaaacgaagctattcgccttgctgagcttgtaggtccttccacccagcaaaagccaagacatcatcacggtctctccatccccaagcaatgcaataatgccgtgcaagcaattgccactcctccatctcatccagcatctctagcccagcaactctttccttctcatcttcgttaacccacttcttccaaataaactcaatatcagcggcagcctggccatccccaaagccctgatcttggaagcggtctcgctgcgcctcaagcgatgcatacctagcgagagtcttgagctggatgccccgcgccgcaaggttcgacaccatcgtacgaccaaaggcatcattgggccgaataggctcataaagaatcaacccaagcggaggaacatttacccgcgcctcctgcaagatgtctccgggcccggatagtggatgcccatgaccaaaaaggcgttgcgtaaagaacgcaactacctgctccgcttcagtaggcgataggtagaccaaacagcactcggagatcagcaaagtcggcaatcccgtgtccacacctggcagtgctccagcagggtcactgcatgtcgacagcgaccgcagatcaaccgggtggacatggtacgagggcgaatggagcgcgtcccccgcctccgacacagtaattcgagtatccttttccgacgaagcctgcgacgagtcaatcccaagcgccctctgtagcaaaggcgccgatctaatcgcgcggatcttttccgctgtgttgacggcgaaatcgagctcgtggtaaacgaagtccggggtttggcgcgacgagagaagccggaagacgcgcgtgtcggacccggcacctagagatatgatctgtttcttgtgtgtattttccggtgagaacgggccgaggaaacgcgccacgagctggtcgatagctgttgtgcgggcgtaggttcctaatgcgcggggacgtgtccgggtcagccgtatgctctcttgtcatcgggaatagcgtagtttgaggggtcgggctcacctctgttgatgattggcaatctacgcgtcgccgacccggcaggtgtcaatgatgccgcgtacacatcctctagatagcctagctcgacggcgctgaggcgggacacgcttgcgtcattgtctgtgccttggacgatgcggtcttttccagaagggagtccagcttcttctgtgcgacttgtgccacggcctcggcctcggcctcgtcgtagagtgtttaggttgggaatatgggaggccatgaggaatggaggaagcttggagcttgagctttcgtggtggggtagctatccgggcgtggatgtcgcctcttaacttcatacccgatttctctctcccaatattaaatttccaacccagttccagaatttgtatcttcgtcgaatcattcttatcgcatcctcgctcctacgtcttgtttgatcgactcggtgactacaacccgttcaggtagaaagttgtaagattcaacttcttacgttcaacagcgaagaaaacgatattataacattgaacatctcggtccaacatttagtacaactgctccctactgccaataccaccgagttactacagagctacgtctgttcaactccccaagcacaacatccctggtagggctgccactaaatctacctatgccaacttactcttgacaaaggcaatagcctgtgcgccatactcagctccataaccctggtgggtcgcggcgttactcccgttgcagcagtacgggtctgtggagtcgcagtatgattgaatcttactagccgacgggcaaaagaagccagaaggacgtgcgtcaaactatgtcccaagagttagatgcaaggcttccaagttcagggggaatatagggcagtccatacacctccagcagcacaagttccaacatcatacgacaaccctgccacatacagcgggtcacccatgaagatggctgccttgaccatgttcacagcggacgttgacagctggaccgcgctgttggagtagccttggttggggacgccgccgccgcacaatgctgcgtccatgatttcaccaccctaaagcatcgtaagtacatagttggtctttcgttttgaatagccgaggaaatctaacccacctgggaatatccgaccagaacaagcttggtcgatggacactgggtgttataagagttcacagccgaggcgacggctgcaatgccctgggcaactgagttggagtagctcacgctgccgcaggacgattgtccaccgcatgcagggtagctgatggcctcggccgtagagcctggataggcattgagaaggccattgacaaccgtgatggacgagccgtatccgggagatacggtggtctcgcgtgcaccaaagatgtggacacccgggcaggagatgcgtttctcaatttcaacctcaaccgggacagcgagggcgccgccggcgagtagggagaatgtcaagattttgggaatcatgatgtcaatggatatcaatcagaaaagtaaaataagcgatttgttaccttggatatgctcgggtttgcaaataggtttgatatccagactccggagaccacggttgctttatatagatctcgaatgtccccttggcaacagaaaccggaatatcattgtattttgccgtatagcaggccatcaagaaatgaatatgaccctttggaccgggcggggctttttgcctaatcgttgtctgattatgaaacctcatctgcattgtggcagtattgccaggttcagaatggaacaggagctacataattaggctgaataaaccggcggataggcctaaaaagacacaccattggatctgatgttggaaatgtgacccgcctgcatttaacttaagccagttctccgcgttatttcaggcaataaatcgtcagatctttctggggtatgcaacagggatcctcgctctgaccggtttggaacgagctatgattcttcacaaacatttcggcaaaaagggctatattcattcccaggggtataggcagatatagagacctgcagcattgacatcgaagatagtcagttcggcttcccaatcgggtatggctcgagacgtgcttgtttcattggtctcagctatagggtccagtgtgcagggcataaaggtacatgtctaagtggtccttttattcctgatggaatctgaaatactaaaagtaggatcatggaatacttttttcacggctatcggaccgaatctgaggaccgtggtctatctttgtcatgtcatgtctcttttctatgtacaagtgaacttaaacaaagtatctaaacataaacaaagttgtttcggcaaagaggacaagtgctctggttgctgctcttgaaccagcggaacagacagaccgagtggaaggtgttcttgcaagtggcacagcgcttgttcggtgtctgcatatctgttgagatgacagagtaacagatagcacactcgctctggcccttcagagcaccttggacgtttcgtcggaaggccagcaatccatcaactagattgccatttgcaaacataataactccctggatcgtcagcagccagctcttccatttcttctcatccacaagcacgcgactgcgaccgacaaccaacgcgggttgaagcgggtacgcgggtgggagagttatggaaatagcaactggaggcgactcttcatcgactggaatgctggcaatgatttcgcctgtcttcgaggaaatcttcacctccaatgcgcgttcttcgtctgcatcctgggtggcaatccaatcggccacgcttttgagtgcatcttcgacaacaaggggggatatctgggaacggtattagttatagttactcgtttagaagggtccaatatcaaaaatactcacatatttttctgaccaggcttccaccggacccttggtgcgtttcttagtgtcaatccaccaattcttggtcatgttggcagtgtatctcaggcaaagatagtacagatgtaccaggagccactgtgtctccttctcggcactctcggactcatctggctcaaatgatcgaatatcaagtttcgatgcatcgatcatctttccgtgagatttctgaaggaaatcaaacgtgaattccagcaatgggaggaggatattgttctctctgatgcttgccgtgtagtattcctgcacagggagcgactgatcggactgttagcaagtttattttacaatttatcgtaagagtcaaaacttacagcatttgagaagtggtcaaataccaccttccagctgagaaggtacgcccgcatactggtccacatcttgtcatctccgtaagcagcagagaccatttgcattgtcggaggctcaagcaataaagacacgagctcatcaggaaggctgactgcagtctttgataaggcaacatcaaaagataccttctcctgcacatgggggatatagtgatggagaagagtgtaagcagttcgctgaattgctcggctgtgtgcagttagaagatggaatgtttcactgacatcctccaatttgtcaacggggatagtgttaatcaggcgtcgtaataagtcaacagcaacatcccggggttgatggaatgtggttgaggaatctatattttgttagacatatcagtgatgagagaaacccgaagcgcttaccaaatgtgtcaatggtggaggccagggcattgaaaagaccggcctttcgatctgaccaagcatcttggacatcgtcattgctgtcactttccgagatagacttcaatcgtgcgaagagtctgaaagatgacaccagtaatggtagaccctcttcacctccgttggttccccgcaagacagaatttagaatgtccatgctttcttcccaatgagatccataaatttccccaagagctggaaggacaagggacaaggttttgatgacttcggatttcaaaccaagaaacattgagtcggattgcagacattcaatcaagttcttggtaaggaaaaccaatctttgtgtcggaatggtggagacaacatcttcttccccagacaatagaatgtttaacagaaccagcttccgcaatcctgcgcaaagttagtaccggtgctatatctgctaatgtgttatcagacacttaccaacttgggaaacatcctggggcttgagtccagtggaatcggcaactagctcattgcagattctgtttccgatgggatttgaaagtatggagcttcgcaacactgcaaaccacgatgccgagcggatgaggtttgctgttcgggcctccctgcagatcttcgcgacgtcctctgaagatttggaaatttgcaatgaatccgcaacagtcattatcttgacgaaggcttcgccgaccctatagtccaagggagatgtaccctttagttcctctagtctgatttcccagaactcggcaagcgaggaggaaacggtcttctcaggtgcgaagctgactggctcattgtcacgagtccagttaccgagcacctttcggccagcaaaaacaatatccatgtattcttcgcgctgatcagccagctcgagacctgagatgccgttgcaattctcaatgctcaaatcgtcatctatcagttgaattgctaatggcaagaaatggaacaaagtctctaggtcgccttggtccaaatgtttccatagctcagaagtagagagaaggttgatggtgtagattgccaggcggaacgcagaagagcgatggtctgaatcgcgaggaatggttggccataaagccttgaaggagtcagatagctctcgctggatcaagtgaacaacgcctcctaatggactggttatagcagtggaaggtcgaggtggaagttggagaaagggggtcagggatttctcccatgaatgacgagagggcagaatatccttcacgctaccagtggccgtaagacctggcagcagttcatttgcgatagcaagaagtgattcaatcctgaaccaaagttagcacaatgtcctacggaatatagtagcaatgaaggacccacgataatgattcttcatccacatgactgaatccatgttggagaatttcgatgcccgacttggcactcgtatcaccaataccagattccttcaatgatttcaacaacgcttccgccaagcttgctacctcttcagatggtgactctgtgaggaaaagtagctttcctgctaactttgacccatgagctccattttggaactcccgaaaggaagatggtgcagacttcccaatatgagagagcccatgcaaggtatcaaacactttatcttctgaagataatgcgtcgatcaaagataagaaaatctgatccatcaattcgccatgtgatgttttgttttgaagaactgcagtgatgataggccaatgagcatggcttccttggcaagctttgccaagagcccgcacaacaagtgagttgagcttgtctttctgctcaacatcattgaaatcgagagaagaaagtaagctttgaagtacgtgcacattagactgttctggctcgagggccaaggctcgctcaacgacgttctcgaaactgaatgcaaatccatcccactcccgacattctaagatgatcgagatcaatcgatcggcagatggtgaaagcaaaagctccggtgcatcattttgcacaaagctttgaaggtctcgggattttttcgcaacagatggcaggctgcgaacacattccagcactgtgccggccgctccatatggtttcccattacgagtgcgcagtacttcgagacaaccttcgagaagggaagtagttgttccttcaaagacttccgatacttgaggctcgacctcggtatctgagacccgtgagagaacagcagactccaagttcaagaggcgtttggattgggcacatattgagtcttgagattcacggaagtcctttgattgctctggggacgatagcttcacagcttctagcagtccatcggaaaggcatgtacacaatgattgcagttcctgggcttgctcggcggaagccagagtgaaaacataatccacacaaatcccttcggctaactcgtccggaagtgaccattgagtcagcttcgggtcaatttgcacatactgcaccaccaagggagacagtctctgtgtgatgaattcggatttttgctcctgggggaccaacgttgcaagccatgctcctatatgggtataggatttccatccgatggcaaggtttgaacgcggttcttctctcgagttgaggccttcttgcaaagcctcagtcaaggcaattgcactggtagaagtgattccatggtcagcagtggccttgtcagcacctgctagtacttcttgggggatgattcgaagcaattggtctaaattcgaccaaaaattagaatgtccgccctgggaccccttctgcatgtactggcgcaatcgcttcgaggcagatgatttcccagtgtagtcatcggtccatatttgaggtctcagcgaagataataaaaggagggactctgacaattcggcagccgatccgatttgcggtagagacaatgattttccaatgatggctgaactgagagtcttccagtcaatccatccaggctctcgagaaaccgcagttcggagcaggatgtatatggatcggcgaacatatggatcatcgtggtgacagagagcccacaaattcttactggctaacaggttctcgatttctggtaggttcttctgcaaatcttcatcggacgaattgcctagagacgttgaattgttagacagggaatactgcaagatagaaacgtttaatatacctagtacgcggttgaaaagcaaaagtgcagctcccgcaacacgggcatactttccttcagcgtcgtctctcttcactgtcctttcatcactcaatgtcaaggctgtttggtgaagaatgacatcatctacaaagtccaaaatggagctttggtagattttccacacgttgtttcttttttcttcggttgtgaagacttttgtgaacgattcaagggcggcacggtggaccggtcgatcattgtcgtagattcctgcgatccatgctccgatgattttgggtaaattgggcacgatccgcttcccaacaagaccagagattgttccttgtataggatgggcaagttgacgtacccggcgcgataaatcaatcgagagtctgggataaattctgacctggaagaaaacattgttattacttagtgtttgtatatggaagcaatctagacatacccatgcatctagaaacccgtcatctagtgttcccatcttctctttcaatgttgaaatatggtcgcgcagctcctctagagccttcaatcgtgtaatgtcatctttctttagtaagttcttgaatgcgataactagttgctgctccgtaatgcgagaaagatctggcggcactgcaatgtatgtgagagcggacgcctcctttccctcgccagagagaccaccagagaatcccccaaatgatccaaaggcactggcagcagcgcgactgctggaggcctgggatttgaactttctgctcatgtggggtatgaggtccgcgggataagcaactagtgggggaggacctcgaaattgaggatttggaaaggcttcggagagagcaaggcgctctgttttcgaattctgagtcagactgtgatttgaatgcctgtatcactcttccattgcgtcaagtaccttcaatatcggatctccaaaagatccgcgggaccaagatatccatcacgtgagtttgtgtcatcgctgtcccgaataggacaagcgcgtaggcggagccgcgaaagatgagcgcgagctctcttctcttctgattctttgccctcttgcgttttgcgtcggagcccagccaagatgaagttcttcattgagtatgttccctatatatgattctatccagtctccaagctgaccagtcagtgatcttccggtgctgtttccttatcctcgcatctaccccgaacaatatgcctacatgtgcgatctcaaaaagaccctcgacgcaggaggtcactgtgtgctggaaatgccctcgggaactggcaagacagtttcactattgtcgttgatcgtcgcataccaacagcactacccggagcaccgcaagctcatctactgctcccgaaccatgtcggagatcgagaaagctttggcggagttgaaggctttgatggaacatcgtgctaaggagctgggtcatgaggaggaatttcgtgcgctcggcctgaccagtcggaagaacctctgtctgcacccttcggtaaagagggagaagagcggtaccgtggttgatgccaggtgcagaagcttaacggccgggtttgtcaaggagaaaaaggagcgtggtgaagatgttgagctttgcgtataccatgaggtaggactttgttatttgcaatacaacattgaacgagctaacaggcctagaacctttacttactcgaaccacataacctcgtccccccgggtgttttcacattggatggactggcgagatacggtgaagagcacaaacaatgtccctacttttccgcccggcgtatggtaggatatcgagcgcgtattccaccaaaagtgtcccatttctgacaagctctaccagatgccgtggtgcaatattattatctattcctatcactatcttctcgatccgaaaatcgcggaacgagtatccaaagagctctcaaaagactgcatcgtggtctttgacgaagcgcacaacattgacaacgtctgtatcgaatcgctcagtatagacctgagcgaggattccctacgcaaagcgactcggggtgccaacaacctggaacgcaagattgaggaaatgaagagcacggatgaggaaaagctcaagaatgaatattcaaaattagtggagggcctgcaggaagctgagaaggcccgggaagaagatcaattcatctcgaatccggtcttaccagatgacctactaaaggaagctgttcctggtaacatccgccgagccgagcatttcatctccttcttgaagagatttatcgagtatttgaagacccggatgaaagtcacccatgccatatccgagacacctccttctttcctcacccacctaaaagaccttacctatattgaacgcaagcctctaaggttttgcgcggagcgtttatcgtcacttgtacggacgctggaacttgtcaatattgaagattatcagcctcttcaagaggtggccacatttgcaacactggtcgcaacttacgacaagggattcgttcttatcctcgagcccttcgagtccgaagcggctactgtaccaaatccaatcctccatttcacatgcttggatgcggccattgctatcaagccggtattcgatcgcttcagctctgtgatcattacatcgggaactttgtcgcctttggaaatgtatccgaagatgctggggttcaccgctgttctacaagaatcatacagcatgacactcgctcgacgatctttcttgcccatgattgtcactcgaggctcagaccaggcacaggtttcatcttcctttggaattcgcaatgaccctggtgttgtgcgaaactacggaagtctagtgaccgagtttgctcgcatcacacctgacggcgttgtagtcttcttcccctcttatctctacatggaatcaatcatcagcatgtggcaaggtatgggtattttggatcaaatctggaactacaaattgatactcgtcgaaactcctgatgcacaagaatcttcactcgccctggagacctaccgaacagcgtgttgcaatggacgcggcgcgatcttgttctgtgtcgctcgaggaaaggtttccgagggtattgatttcgatcaccattacgggcgtgcagtgctgtgtattggtgttcccttccaatacaccgaatctcgaattctgaaagctcgtctcgagttcttgcgtgagaactatcgtattcgggaaaacgacttcttatctttcgatgcgattcgacatgctgcccagtgtctgggtcgtgtcctgcgcggcaaggacgactatggagtcatggtgttggcagatcgtcgattcgagcgaaagcgtccccaactccccaagtggatcaaccaggcaatgttggacagcgaaaccaatcttagcactgatatggcagtatcaaatgccaagaacttcctacggactatggcccagcctttcaagcagaaagatcaagaaggaatttctacctggggcttagctgatatcgagcgccatgaggcaaagagaaaaacggaggaagcacggatgactagagaggaagtgaataacgggcacccaatggacggagcaattccatccgcatcccggatcgtcgtggacgaatacgacgatgacattgatgaggacctcatgatgcttgatgcgtaataaaataatcttgttctttatatgatgaggcatctactagcataagcagggcgtttggaattgagcatggcgccatttagcacggcgtttccaaggcagaaaccatctaccttacaattgaagacaaatatcttaacgactatcctttggagctatggaagctatctataatattttgagcatagctttgcatgaagtacgggtaggttctttataagctttctagatcaatttcttcggagaagatgatctcatgtaaacatgtaggtatatcattgacggattgcttctgcttcttcggcttaacaactcttttcttccgtaaaaccacctacagtttgataccccagatggacgaccgttgttcggagaccaatcgaaagaggagacgaatctcgaaaagaccgaaaatatttatgctctgcagaagttctgatggaacttctgagttacaggttattctttaaaagaattctcagatacgacggggctactacatgaagtagaagagttggtatcttcacttatccgcctcgaaaatcaccttgtgggcccgcatgttatcgaaatcgtcatatctaccgaagggtcaatcatagggtgtcaaggactgaacaagaagaacttacgcctggacggcctgtgagagcggacgaatatcatgacacatgaagctaggaaacgttagatcctcgcgaaacaaataagagtaggtcaggcaaactcacttgagaatgtcctgcttcttttcgaagaggtccagcgccggaccaaagatacctagcacagttgagcaaaatagccaaagtaagatgtggaattaaacatactccgaacagggcatcggcccatctgtagactgaggttcttcgcgtaggcttcattcccggtccacgggatctcctggttatggacgcccacactcgatatccggccccaggggcgtaacaaatcaaagcccagcctgagagcgtcactatgtccgacgacttcgataacgatatcggctccacgaccatcagtaagatcctttaccctttgacgcagcccttctccgtcttccttgaaattccaaggctccgctcctagactctgtgcaagtgctagtctggaaggtacactatcgattgcaatcagagtcttcggcttgtaatcgagagcaccaataagtgcgcagataccgacagggccacagccaaagaggagtaccgtgctttcgtgaatctcctccggagttaggccagagaaggcgttcagagaggcaaagtacccggtggggaaaatatcggccataagaaccaacttcttctcgtcgatggaggctgggactttgacaagagtcgagtcggctagtggaatccggacatattcggcctgtccaccatcaagtgcaacagtaccgaatagctggcattgagcgcaccgagaggagaagccacgcttacagtagaagcacttcccacagctcgtggtgaagggtgagactactcggtcgcccttttggaagttcttgatgtccgatccaagttcaacaacctcaccagtaaattcgtggcccatgacaaattcgattccggacttttggtggccgcgaaagacatggagttcactttgcaaatatgagcggttgtatgctgttagatatagttctctgtttcttacctgccacatagcgcagtgtatcgcaccttcaggatgacatctgttggatcttggatcttggggatgggcttttgctcgatgactaccttcgacgggcccttgaaaacgacagcttgcattttgcagtatatatttcctttggtttgtgtagaatatgctaggatgttgaatgacgttggaactggaagtctaatttaagtagagatatgcctagtccggcgacatcaccgacggacctcggcaggtctcggatttgtggtggcacgactggaaaacgacaaacaggattttggcataattgtattgaaaagtaacaagacctattcttcaacgatttcgagtgttctaaagaggcctctgtccgaaaggcaaaactggccttcatccatccaatgaagggtatatcaaagccgtttttagcggcgggggggctttttgcggggagaaaagattgtcggccttaattttaaggttgcactgaccgcttttctcaccggctttactttgacccctctattaattctcagtggtacctttgctttgtatgtaagccccatataaaagtaagtcactcatttaaccttaattcaaaagtgtaaaaatccagctggcagaactatatactacctgaggaatgcggcagaaaccaggcattttcaggcaggagtggttataaacaagtaaaagccatattacaacaccctaaggaaaagatctattttcaactagtcaagatgctaatatgaacaggacttttgagttccgctgcaaaaagacaaactccagatcatcgacacatcaaagatgaagcgaaaacacaaaaagaataagagcttcgcataaacacaatatacacacatatgaagggggaaaaaacatacacattgcagaactccatccagtcaaagactatgctacaggagcaagaatgtcgaaggaaccagtgccgacggtgccgacacggccaacaacaattctgctactagggctcttgagattatcattacctctctcgagcacaacgtccttcagggcaccgacagtagtctcgaaactggcccgcgcgaaagcagacgaggcatccttaaccaagccgttacgactgaaggccttgaagccaccagactgtgtcatcacatcaccgatcaaattcaagtgacggttgtcgacggagatactgtgaccaccgaaaacggcatccatttcgcggacgatggtagcgcgagcagcttcgacaccgtacaggttgagcatgtcgtggatggagttggtgtagatcgagtggggcttaatgatatcctggtagtcgcgcatggcgagaaggttgacaccctcggtgaggatgttggcgggatcacccttggcctcatcggccgggacgaagacacagttgcccatgccggggatgcactgaatgacggcgaggtggagaaccttctcaaccaggggaaggaggagaagcttgggtgtctcaacgtcgtactgcagttggatggagcacgagttgcccttcttcgggtcgaacttgaactttgtaatctcctcgaatttgcctatcacatcctcctcgcgcgccttgctgtcttgggcggtctcgtcatcagactcatcctcggaatcggagtcggagccgtccttcatgcgcacgtcgcgagtggccttggcaggcttgctgctttcattttcgtcatcttcgtcttcgtcgggggtgtcttggcgtctgatgatatcctgctcggcggcgtcgggtccttcgtaggagacctggtggcccctgttctgagctccggcggcccgcttggcatcatcctcatcatcttcattgtcgtcgtcggctggttgggcttcggtgtcggcgcctctgggtgcctccgcgattttaccgactgaaacaccgatttcaggctgagaagttgtgcccttgacgcccttcttctcttcgttgcgcttcttgagctcggccttggtgagtctcaccaaccgagggatgagcttagattgcagagcaatcaagacatccttggtctcaatggcgtattccttggtgtattcttcagacgggaagaagtcgatctcgatgtcgtagattttagccttagcgtagccaatgcccgagccaatgcgttccttgacttgcaccttgtcaacaagttcagcaatgctcagtttgctgatagccttggcgaatttctccgagtcctctttggaaatctcctcgttcaaaagaagagtcatcgtaggcgtcataatcttggcacttgctgtcataacaatttcacgaagacggggaatacccagtgtgacgttctttgccgagtgaccagccaaatggaaggtgttgagagtcatctgtgtggacggttctccgacggattgaccggccataattccgaccgcctcaccggggtcaatgatagacttcatgtacttcatgttcattaaggcctcgaaggtcctcttgctgaccttgccctcgatgttcttcttcttgtctttaatgagcttactctggttgacatccgaatactaatttgaaaagcttgttagaattgcaaagaatcgcagcgaagagatagcgagtccataccttctttagctcctgtgcgaacgcttcagatgtacttccgaggtttcctccaggggggaagtgggataacacagggtccacagcatcaatctttccagttttgcggaccgccttcatggcatccttgtgccagttcgtgacattatccttcgccagcatgtgataatcatctgcctggacttgcttggaaatggagatgtggttctgagcaaggaaatcaaagtcgttcaggtgtacctgtttggtgatgtcgagaccgtcctctccgtacaagaactggacaatggagccatctgacgcttcgcggacagaggagtcgtattcagccttgagaccttccatacccttgattaaacaacgttgcaggtaaccagatctagatgtcttgacagcagtatcaatcagaccctcacgaccagccatggcgtggaagtagtattcttggggcttgattccggtcaagaaacgaccagagacgtaaccaccggccatcgggtgagtttcgaaagccttgaatgacggaagagtctttccactgatcatgagtggtacacggcgaccctcaagaacctgttgaccaagattacaagaaatcagattggcgttaacactagatcccttggctccagatatcgtcatagactgcatttggttccaggggaaaggcttagcaaggccgtatgggagacaggcgctggtgatttcagaggagagcttggcagaccgggcgttagaaacactatccaggccactttgcttgtcgtcatcgcgaagaacctcctccaatcgtcggttcaactcggcagtctggtcaccaggagcctggtccaaggtgacatacttcaaagcaacttcgcgacccatctgaggagcagtggccagcttctccttacggatacggtcaccctccttggtcaatcgaagatcgtcgataccacaactgaagccacgcatgttcaggacgcgagtgagaagtcttccgagaataccgataagcttgccagcaatgctgtatccataaacttcatggatggcatcgatgagaccaccggccgtgggaccgagctgtttcttatcaaggataccacaaaggtactctccatcctggaagataacttctccttcttcgttgccctcgccccatcgatcgccaggggttgaagacttgctcagcaaggtcaaacctcctcgctctggaggctggatattcttgagaattgtcgtgatgagctgctttccggtccacaggcacttgggcttgcgcatggcaggctcgaccagttggatccggtcagtgacaatatgcgaatgttctggtctcaagcaactgtacaacagctggtggtaatcctcctcgtcatagaagctgtcacggcacgtaacccacgttcccatagaaatatgatcttgaatcagacctctgagcggttttccggatgtggcaacgagatactggtggtcggcatctgccaacattctggcttccgcttgggcaagctcattctgagggaaatgcatgttcatctcgtcaccatcgaaatcggcgttgtaggtgttacaattggcgtagtgcatgcgaataacccgctcattgggaaggacacgagccttgtgacccatgatggagggtttgtggagagttggctgacggttcatcaagacgtaatcaccagtggtgagatgacggtagaccttcttgttacgcgaacctttctggcgccaatttgacggtgcgagtagtgagttggcaagtgctgttcgctcttccaggttcttgaacttgaggttgatgacttgtccgttttcgttctcgatggaagaagcgccggggtatttgtcgggaccgttgataacagcctccttcaactcccagaagttgtggtttgtaacaggctcagggaaagtcaacttcttagcgaagacaaggggtacaccaatctcattgggttcgatgttaggatcgggcgagataacactacgagcagcaaagttgacacgcttgcccatcatgttctttcggaacagaccttccttcttctcgagaatctgcttgataccgttaggctgtgctaaggcagctgagccggtgacagaggtacgctcgcggtccaccaacccgttgaccacatcttggagttgaacaatggcttgaaggaggtcactgtagtttcgtgcccgagacatggtcttctcttcctcgttttgaatctccttgctgatttggttgatagtgtcacaaccctttaaaatcgcattgaacgaagtgttctgctgtgcttccatgactgttccggcaccctgctggactgcggggcggtacttgtttggtggcaccaaaagactcttgaagaagaacatgtccgccgacacaactttcattcccttgggcacaggtcgagagttgtagacaagctgcaggatctcgctttccttttggaaaagaagatgaagagctccatagacttcggaagaagacatgaattcctggccggtcgatccctgtacctcctgcacgacagccacaccacggcgaatttcttcctcagctccgtggatctcagaaacgccgttcttggacttagagttcctttcttgctcgagaaggaccatggtattcggtgcttggaatcctccttgcaacattgcaagcttttgcttctcgggtaattgctttcggaagattttgttgtagcgatcctttttataggcgggggacactctgccataatgttagctggaaagccaaagtcagggtcgaggaatattgcataacgtacccgctgcagctgacacatttcttgaacgaattgatatccttgaagaaggccttaatcaactctcgcctggcctccgcggcaatagggttttgtccgccaggcatcaaaccgtccaatttgccctccttcttggcttcgcgaatgcgccgagtgacataatcagtcctcttttgcatatagtcatcctcatcgggatcgtctgagtcgtcggaatcgccttccttgctggtcgcctttgatttgctacctttgacggatcccatcgcatcgacaacagcgacttcgtcaaccaagccatattgcagaaggcgcaatttgcagatgtacatgttgacctggttgcgacccatctgcaggcgaaggcagtatacacattgtgctcggagaaggcggaagatgtgatcgaagaaggtgacattatagaatggtactggcagctcaatgtgtccaggatgtccggtacaagtgaatgagttctggcgacaggttgtgcatctgtagaataagaaaaactcaaacattaaagattgaacagtatactactcaagtcaagacttacacatgatctccccaagcgcccatagcagggtcttgaagaccaccaggaacaggattgttaaatgaatccagagtcggagtattgtgaattcttttcaccgagagagctttaatctcttcctcggagtacacattgaagtcgaccccattaatcgtcgaggcgacggggcgcgcgaaagttgccattgtagcctgcagctccttgagcaacagaaaacgctgtcgcgcgaaatcaaagtgcttggatacaagatctccaagtgcttttagttctggagcgaacttttttttttccggaccaacttcttttctgccatcgcgccaccgccttacccttttcgggttccgtgtggattgatgcacaactgctgttacttgtctatcctttacgcattcaacctttttgtttttcctttcgtcggaagaccgagtgagaggccgtctatattatggctgatgcatcgggcaatgcgctcaagcgtcctcaccctgagggtcaacacgacaactcccagaaaaggacccgctccaaccatgggtcgccagcaccaggtcaaggaggtgctgccccgggcaagccagatgttgcgaaaataatggcagaagcaagggcaaaggcagaagctgtacgcgcacgtctacaagcacacggtagcttaccagcgaccccaacaccaccgcctgcaccttctgcaaatcctcctccaccaccaccacccgctcctgcgatgtcgaaactagaacaaatgaaagctcgagttgctgctgctactcaacgagcaagtgtaccctctcagccgcgacccagtgcacccgcattatcctaccaaccaccggcgcatgacgatgagggcatgtcgaaggctcgcggtggtctggatgttggccttcatcccgcgcttctgtctgatgctccaccggaatatcgtggtgcaaatggacggcagtctaagccaaaacgtgctggtgggcctcagcttgatctgtctggtccgtccgccgaggaaatcaggaataatccttacttcgacccctctctcaaccccaaagcgactattgcaaagccccgacaaacccgagagctcctttttaatcaaaagggcaaatacatccaacaggcagcggctctacgcagacaagcacagctagaagctatgaagaaaagaattgcagagaaatcgcgacaggccggacttgacgaggatatggatgtggaaaaggcattccttgttcctgctccacccgatgtagagtggtgggatgcaagattggttaatggcagcgactatgacgcaattgataacccggaaaacatcaaacttgataccctcaacagctatgtccagcatcctatcgagctcgaacctcctcaagacaagcacatgcctgcacagaagcctatgttccttaccccgaaagaacaagccaagattcgacgacagcgacgcatggcagatctgaaggaacagcaagccaagatcaggttgggactcgtggaagcaccggctccaaaggtcaagaaatccaatctgatgcgggttttgggcgagcaagctgtgaaggaccccacggccgtggaagctcgtgtgaccaaggagatcgcagatcggaaagcagcgcacgagcaggcaaatgaagaccgcaaactgaccaaggagcaacggcgcgagaagttggaagctcagaaagagaaggatgcctctttgggcatattccaatctgtgtatcgaattgacagtctggcgagcggccggaaccgcttcaagatcggcaaaaacgcagaacaaaataatctgacgggcatgtgtgtcatgcatccccggtttaacctggtgatcgttgagggcggccaacactctatcaacaattatcgaaagctgatgctgaaccgcattgattggaccgaaaaccctggatccgatcgagtgcctgcagacagccctgaagctcaggtttcctggttgtccactgaagatgataagggagagccccgggattttagcgcgaacacatgtaatctcctctgggaaggaccgaccaaaggtcgggccttcaggaaatggttcggtgctcgtatctgtgagaccgactctgctgccaaagcagccctgtcccgagccaagatggagaacttctggacactcgcgaagagtgccaagccagctgaatattaacatttcctacgacagataatcaacgtctaggtttattgtacgtctacagatagcgaacttgcttcatagcctttgtcattgtcatacatgatccataatacttcaggtatttactgtttgacactgtaaatcattcaaaacaagcactcaattagagctatggaaaactttttaaccacccacataaaccacgctccgtatgcaaagccgatgctaggatatctatcatagaagaacatgtatgaaaaacaaagtatcaggaaggaggaggaccctgatttccgccgctcaggttgcgtagcagatccagctgagctttaacttggtcaaagttcatagctggattttgggcctggggaggctgatgctgctggggctgttgttgaggctgttggtaatgctgctgagactgttggtaatgctgctggtgttgcagaagctgcaggaattgttgctgctgttgttgttgcaagagagccagggattgaggattgaattgagcagcaccctgctgcatgttctggaaattattgggctgcggttgttggaaggctggatatggggagaactggaaaggcatctgtggctgcgctccaccttggccgaattgcggctgttgcgggttctgggcttgctgtgtgtattgcgcatacgcggcgaagggctggggcatcccgtatggctgctggggttgctggtacattggctggccgtaggtagcagtgggttgcgcttgaggctggggctggggctcgtggattgagccgctggcctgctggggccggcgatcctggtcccactccctccctccgcgtccacctctgcctcgtcctccacgtgcacggtcaccccgaccacggtcacctcggccacgacctcttccgcggaacccaccacgctcgttgccttcaactggtggctcacgagttctcatcatctcgtggaagttggtagggcgtgcaagaggggtgtatccctcctcaccgccagcatcgtcgtagttgagctcggtctggttcaatttggaaggtcctggggctggcttcttgcctttggggccttctctggcttcctttcgatcaagtcgtctctgcttcagtttccgcttgtactcggcttctgcttcatcatcggagaattccatctcttcggcggcaacttcctcgtcgtggaagttagaagcgtcacttcccttcatgcccttgagcggctgggtgaagacaaaggtggagtgtccctcaacatagaagatatccttgcccttgactaagcccttttcttgaacttcggaggctgtggcgtatgtgacagtatacagaggattctccactctgcccagggtttctgctactacaccaatgatctggcgatcagcagagcagagcaaggagcccgactcaagcacctgatattctccagaggtattagcctcgataagaacattgttatcgatagcggcatgaactttgccgaggaacacaatcttcatctcgggggtgatcttgacgtcagggacaggcaggacctcatgttcgatctcgttcgtggtccgcagttgtccgcctggtttccccttgccatctccctcgtcatcagagccaccttccgcccgcatgaggatctgcgcttgctcctcggcactgaggattgggtagtcttcatcgtcgctatcgtcggagtccgaggaatcggagctgtctgaagatgactcgtacggggaagagtcgacctcccactcaggatgttcctcttcttcgacatcgcccgcctggccagtggcttcgatcatattgtcttggtggttatcttgcgcgacatccatagcttcgctgaggggagcagtgggctcatttgtgaaatggttcgcctctgtctccttcttgatcattacttcggtgggctcgtgctgggatataagatggatttccgcttgctggttttccgtctcgccttcttggtggtctagttgatcttgctcttgctcttgcttgattgtgtattcggtcaaagccgagccggttggttcgtcggaggagtgttgaataaggttcaatccggggatatggcttggcttctcagttgtgctatctccagcattcaggctggttgcgccgatgtcttgggaccctgcgataggtgtctcgataagacagggttttttcgaggcagggccttcaccggcacctgtgctgtcagttgcagggttttgatgtccatccatactaaatctccaactcaaaaacttattgcataaaaaccagttcaattcgaaagatcaaaagccggacgggaaacttttttttattttgccatactctgaagggcggtcaacaatgtcttatcggttatcggttatcgtagctctgtccatggatgattgccttgcgacttaacttcaacgtacaagatggcaggaaacgacaatgccctaggggatgcccataaacctcggacaaagaagcagtatgttcatgaacctgtgtgaaatcaaacatggtgctaacctatgtatagaccgccaccagctcccttctacattcccctcaacatcactctgtacatattcctagttgccaacactctcgccgcactgtactctccaattcaggattgtgatgaggtgttcaatttctgggaacctacacattatctgcagcatggatacggtcttcaaacctgggaatattctccggtgtattctatccggagctggctctacgtgtcgctccatgctgctgtaggcaagatcgcatctttggtggtccatagcaagacagctgaattctacacaattcgcctatctcttgcatttctgtgtactgcctgccagactcgactatactctgcgatatgtcgtacactcagtccccgcatcggtctgttttttgttatgatcatcacactcagccctggcatgtttcatgcttcgacagcctttttgccctctacctttaccatgtatatgtctatgcttggtctggcatcgttcctggattggaaaaactgccgaaaaacagcgaagggcatcatgtggtttggcctggggacaattgttgggtggccgtttgccggtgctctcattgtccctcttttagctgaggaggctattgttagtttcatttctggatctgtcggctcactgctgtacaatgtctttgacggtatcactcgttgtttgtcgatcctggtaggtgacttcctacttggtttcaatttctttactaagctgtatcacaggctctagaagttgcggttgactatgctttcttccaaaagctcgttctcgtgccttggaacattgttgcatacaacgtcctgggtggagaaggtaagggaccagatatctttggaactgagccatggactttctatattcgaaacctcttgctcaacttcaatgtctggtttgttctcgccatgctatccgcgcccctcctacttttccagatcgtcttccgatcgcacaccgcctccttgcaaacctcattgcggtccatggccctggtcgctccattttatatgtggttcgggattttctcggtccagccacacaaggaagagcggtttatgtacccagcatacccgttcctggcacttagcggggctttgagcttccatatcatcctaacctaccttggctccactaacaaaaaggagctgatcggccgcgtaccaactaaattaaagattgctgcagctatgtcagttgttcttgttggtctgaacgctggcatgctccgcactctaggtatggttacggcttataacgctccattgaaggtgttcgagccactacaacgtgtggatatcgcacaggcaggagactcggtgtgtttcggcaaggagtggtatcgcttcccgtcatcgtatttccttcccaacgacatgcgcgccaagtttatccgaagtgaattccgaggactacttcctggcgaattcccagatgcgccaagttatattgggcgtctggatggtgcctcacagattccatctggcatgaatgatctcaacatcgaggaccctactaaatacgtaagtgtctcaacgtagccttagaattattataccctattaccctatgctgactttacaacaggtggatatctctcaatgttctttcctggttgactcttacttccctggtcacgacgcaactgagctagagccccattacctcctggacaaggcgcagtgggagacgctttcctgcgcaagcttcctcgatgcgtctcaaacaggtcttttaggtcgattgatctggattcctgatttcccgatcatcccagctcgctttcgacgcaaatggggcgaatactgtcttctccaacgaacagtcgcaggccatgtataggtcttgaatccttctagataaaacctctagaagaattatgtaaaaacatcaacagtgaaacattcactcgcatcgagtgcaaacaaataagtaaacaagaggttatcaagtacatgcgtagcttcacctttcccaattagggcaaaatatccctcaacttttagcttttctccgcagataaaccctgactccgcttcactggaggccaacaacagacaaaccaaggacaaaattatgcagtcccggatttgacagctcgaaaaggacggtctctattcccagccacattggcatgttgaccaaagatggactatctcgtatcggattaacacggcatctcgcatgagaggaccatctgggcggttaatatccttctccgcactccagacttgataaggctttgcatttactatatactactaaagttcctcgacttctatcctcaatgtatcctcgaactggctactgcctaaaactactctgccatgaccatgtcggtacttgagtccctatggggaactatattatccatcccaacgaaacaggccgtggatatctttatcattttcgctgtctgtatatggtttattatcgtcgtctcacggaaatgggtttctagtacgaccaaagcctcgaaaggtgatctagagaaacccgtgcgaggaaaggtcactaggccacctggtggtaagtaaattcaggatggtagttcatgcaagagaaagtctcactaactttctgtagaatggactccatcggacttcaaacggccaacagcagccccatacgcaggatgggatgtccactcgacgaagccaattccctaccggccgtttagatatggcccgtaagttgaataaatcaatagagatactgctagccgtcttttaacctctcctcgcagaaaatactacgtcacactaggtttaagaagcatgaaatgggacgaatggatcggtgagtcgttcttcgatagccagatctcagcagcccattgacctcatatacccggaacacagagctcgacaaccactatctcaagtaccacgccgacaaatcacgccgcattgaagagcgcggcagcaaatgctgccacaccgcaccagaggcaatggatgctgcaattgaactactggaagaactgtaagagcaatcaaaacatacacatccctatccaagacctcccctaactcctctcaccagatgcgcctacctccccgaaagatacccaagcatgttcaccaagaccgcaacaggaataaccaacaaagtaacctacgaaaccttcaacataacccaacgcccactgccagaagacccaatggcaacagccgcccgactcgtccaagacgacctagcactaatgatcgagcgcccagacggcgaatactacctcctcgccggcgcagtcctattagcgggattctggcgactgagcgacaagttcgggatgcggctctcagaaatccacacatcaggcgacgtaccgcagtacaagagcaagctggaaaaggggatgctgaatttcttccgccgactgcggcccgaagagccggttcttcggaacaattatttcatccaggtcgacgataacctggcgtggtcgcatagtattgggcctgaggatgccgagacggtgtcgtggaatacggcggagaagaaccgggcaattgagaatcatttcttccgctccgagaggcagtcgctgagaagattgcccagatctggggcggtggtttttaccattcggacttattttgagcctgttattggtattgctgaggagccttatgtccctggccgtttggcggatgcggttaggagctggggggatgatgttgggaggtataaggggaaggagaagtatcaggatgttctgttggagtatctggatgagaagcatagactgcaggttgagggggggttagatgttgagaaggaggatgaggttaggaggtatcctctttgaatgcaatgtgaatgtggctttttatggatgatgtctttccttattcgagtattggcgatattcctttccaagatcaggactattagatgcaaatattgcaatgcctgatcctgcgcataatcaaaatcaagaatatgacctccggaaagatgacctcaacaggcgcaatatgatgtacatagtaaaagagcatgctcagtgctaaccaactgcatattcctgcacttgctgaatgcaacaaaaaagcaagtctcaactcaggctcaaacaagacagatcatatatccgcaatgggcccagctctccgacctccaccccgtctcgcataagccatctcacgctcctcgcgccaagagcactcatcgcggaactcgcagacccgacatttccacgcatccatgatatccacgccaacgggatctcgtttgccgcgccaccaggtcatctggtcagctaggtaggaggtgagggttgtcggatcgaagaggaaagatcggcttccgatgagctgtctgtttaggtcttcatcggggacagatgagagatatctagccgtaagcactggcgagaggagggttgagtatggttccaaaagctctggctgggaaagtgatggaattgatggtgcgacggattgtgtgtcggggacatcttcggggaggaatgtgaggcggagttgctgtatcatgagactccaaagacgggagaggttgttatgtgttagaagggtatcgattgagtcctggctagcagtggaaggatcccggcactgttcggattcttgggaggaaagagcgtcgaagaattggtcgttcaggccgccgacctccgaaacgaaggcgttcgtgaagggtttctcagcatcgaagtcgtaacgagcggcaaggcgatcgatagttacatcgtcgctcgtgatcagccggttgagcatatggtagtagagttgcagctggagaagagttggccggaaccccgtgcttttgacattcggtagtgatcggttacccttcgtcttcacgtctgtcaaataaatccggcgcaggttatagaccgccgcaggcaattctggctcagtgtgccccgtttccgcggcttcactttgccccagatccgaaagcttcatcccgccttgcgaagaagaaagcaaaaagtccgacaaggacatctgatactccggcagcgcagcgcgcgatgctacagcgtcggcatagaacccagcagcagtagcctcaagctccgggttgggacattcataggacaactgatcaatgatgccattaacaaactccccatcgacaacgccccaaacctccagctcacgcgtaacaccatactcgcgcagcatgcgcagtccctgtataacattccatatcctgagaccccacgcgtcctctttcgtcgtgatttccacagggacggtagtgtagatctcatcctcgagcgtcttgtgcatggtactccccctcttcatcgcagcggtcctcttcttccgcccatgtttagtcaacgagaaccagtactgcagctcgcaccaagccggcgagaccagatccgtcaccgaaaacgccttgttaggtgcttgccggaaccgttcgacgggggatcgagtatcgagcgctgcggtgacaggatcttgctgtgtcaattcgagcgcgcgcgctgcgttgcgctcgcgttctctttctcggccctcagttgaatcagcggtctcgactaaacgcttcggagaagatgtcgtcagctcaattcgggttggatgtaacgggaccaatataatgggaatgggaaagtgtggatgatcaacggcgaagaggaagaggaaaagtagagacgatatagcataccaaacgggctactcctgttgctgttgccagcgcgcggatctgacctccccattgcactcgtcctcgcaccccatctagccgtctgacccggtcgaggctgcgactgccgccatgacgagtaaggctgttcccggcccagcaccttaggcagccgagcgctagctggctcaatgccatcctcgacatctgcaaggagtgcttctagagcttccggttgcaatgactcgagctcggcgagtcctggggattttggtgcggtgatgtgttcgatcggcgttggggttgagggccaggttgatgtcgagatgaaagtggcgtcggcggtcgcgtgttccgcgacggctttgtttaacagattgttcaacagatcctcttcatctagagtgaagtcggatccgtagtcagtgtcattatcatctctctctaggcaggacatgcctgcgacgggagggaatcataacctgttagatagagttgatgttcgggtgcgtcattgcgatgttgagggagctgccttaagaatcccgttgttcttactggctggccatcacgtacttgataatagagatattggataactgtgacataaaatttaaatagcaaaagagactgaagtctattgatctaagtaattgctcttggtatcccatgcatcgctctaaaacagaagaatcccaacgccaatactccgcggggatctatctataaatgtatacctccactcagcctcaactatacttccaggtctactgtccacgcattcatatagtcccagcagagatcatattccccccagaaacaggatgcaaagaaccagcacccatgccctgcgcctcagcaagcgcctcagcagccgcaacctccctagcagccttcagattcaaccagttcagataggtctgccagccaaccgcaatgcacccagaaaagacgttccggaattgcgccggcacgtacatgaagctgaacgcagtaacaatcggccagagcttaacgctgtttttgatactaacagggagagccttcttcacccgctcccacgtctcctcgaacgtcgaaccagcaagaagagagtgcatgctaaagaagtacgtgttgaagacaggagtgaaacacgtctgctgcacgacgactttcgtcaggatcgagaggaatttgctcgggtagttgaaatggttgccgaggaacatgaacctgagagggaagttatatcagttaacagtgtacaatacgaatacagacctctccactaatatgtaacaatctaatatccctggtcgcatgtcgcacgtcgccataatcaaatccgcatcacaaaaacataccagtgataagttggaatactcgacgcagcgccaacacacaaactccgcagagtcctaagcggatcataaccagcgctcacagtctccccttccccaaccccagccgtatccccatcttctgcgtccgatttcgcaggcgcaggaacctcagaaggaaacagcatctgcgcgctcagatcaccacacaggtatataacaatcgagctccagaactgcgttgtatacggcttgcgatcttgcgcgcgcgcgtaccatctcccaaacttccccagcggaccggccattaccaccgcgcggaagccgcgacttcgcgttggtgtggtcggtgctccggctgcggtagcggcaggggctgtgtctgggcgcgggcgcaggggtggagttgggtggcttgaatggtgcgagtgcgagtgcgagtgtggtgggtgtgcaggtgtagcatttctctctgctggtgtctttcccgtagaggagtccgagttgtatcggtgttgtgggcgtccgcggcgcaatacttgcggcttggatatgggggttatcggtcggaagggggttgagggtgaggttgaggcccttggtaagagggcatttcggagagggttcatgaccaagacctcatatggttatttgagtgaggatagttgaaggtggaagtaaagaaaattgtgagtcaagaaacaatggctttgaaatccgacctcggggattgtggcgataagagccgaaaagcgggggaaatgccgagatcagtcccggatgcggttctaattagggttgggttaatttgtttacatttaactctattcgtagaagatatatatagacttgtagaaaaggcgtccgaaagtagcctggtatgtatatgtatgtatgtgtttcttaaatcaatcccaaactccagctatacaaatgcagcccataaaaacattagtcggatgaggttaccctcggtgatatgaacgggtatcaaaatagaaacaaaggtataacacgcaaaaagggcacttttagtgatcccaaagcaaaggggtcaatagaaactatgattagtgacacagacatgtataggtatgacaagcccggacagagatggtaaggtgagagggaataaacagctgatcatcagccgcctattgcttgaaggattcacgggtgttgacacggtcgatatcgtaaggatttccctcatacgtaaccgagcgagccaacgaggcaccagtgcgaatagaagcaagggagtgcgcacggctgcgaatgcgctccgtattagcaagttcttcaacgccgtcctgggattcgctggagagtgaaccgtcgggcagagcttctgtgcggtcgtattcctccttctcatcttccatcggttctggaatggcctgttcctggatcttgcgcatgaatgcctcggactgggcggcgaacttgcaacgggtgcggatcgcgggtccgtatttgtagaacaggaatgggaagggcacacaggcgagcgccaggaaggccgggatcgatgaggcccagtgaatacccaggttgttgtacatgtaggtggtgaagagagggaaagcggcaccgaatagggaacggataacggagttggcggctagcacggaggcggcgaagatggtgtatgagtcaatgaggtagttcatgatgctgaggaagactaggaccattccgaagccaaagggaacgccggctgcgatgctgaccatgaagtggattgaggggtagttagtccatgcgaaccagaatagaccgactgggattgcgacggatgcgacgaggcaaggcggaagacgtgcctccgggggtgcgaagccattatatctgtcggatacctcaacatagcgcttgttgtcaaagagggagtagatgacggcagacaacattccgatcatgatcccgaggaaggcgaggccactaacaccctggttccagccacgggactgctcgtagacaatggggaaagcggcgaacatcatatacaaggtaccgtaaacgatagccatgtagagagacagcaggaacacaataggctcctggaacaacagaatccaagggcgggagagcgacaccttgaaagagtccttcagagagaccttgccttggtcgatttcaatcttactccggtacacctggcctgacagctttgacagtctctccgcacggcgacggagtagcacgggcgcataggtctcggggatggtcagagagccaataatccaaaccgtaccagcaaagacggcaaggaaacccatgacccattgccagccaccgtcactcataccaatgaatccaccagcgatggggccgatgatagggccgaggaaaggtgcagcggcgaacaagctcatagcgatacctcgctgtctagcggggaacatgtccgcaatgacaccaccggcgttggtcaaaggcgaagatccaaatgaaccggcgaagaagcgaaggatgatgatagaccaggcatttctagaacctgcgacaccagcattgaatgccgtgagggcagcgtaggtaccaatgaacagtacttgacgaccaaacagctcactcagtggagcccagagcaaaggtccgatctataccaagcaaataacgttagtatgcatgcgaggcagattgcgcaagagtaaatatctaaaagatgagatcttaccgcgaaaccgagaacgaaaagcgaaacaccgagagtggcaacttcttgtccaatgtcaaaatccaccataatctctcgaataccgccggtataggcagacgacaccagtgaaacagccaaggttgcgacggcgaccagcatggtaaaagtccatttcttcacctcgctaaagttcatgggattgcgagggtcgttgggaagccatgttactgcaaaagggtcctcatctgttcctgaaccggggtatgggtggtcgatgatctcttgtgtgacgacaccttggtcaaagaccaatcgccagtatggaattttcgttggggcggaggactcgatcttgtccgagacctgagggtctgagtcagctgccatggtgggcaggtagtgaattaaggtttcgatatatagtcgacagtagttgagtatgtatttgctaattagaatgaaaattgcgtgggttcctgaagctatgcgggggatagaaaggttaaggaatgtcgaaaaattagtggaatgagaattagatatggacgtcaactgccagctatatataaagggggggttgtcaaatttatgaacgcgatatatgcaaataaagtacggataagtggaataagtgggataggtgggcctcggacccgggcaagatatgatccgagaaaatttgcgatctggaccccaggggctttatttgatattgatttcatcctgatttcatgcctaatccgtacatacctctcagactgaattgaagggctatgtgtcgtacaaatatgagtgttcagatgcagccctggaggcaaggcgtacagtgctctcgttctgtttgcagccacgtttttgcgccacgtgatttatgcaggttttatgtcgagccactcgggtatgcggcatctatctgattgggtcacttgaccgcaagtttcagagcagatcaataagccaacgaaaggttaactacgggtttatgatcctagctcttctattctagtctagtctattctgaaggttcgatcttgttttcgatctcgtatctctttacatcacggagtactccgtgacttttctaataatgtacagtagtattgtataccaataaatatgacaaatacacatggtcatgcataaccctcggaccccgcccacattcggacgttccgcatgggactcggtacctaaccgaagtttcatccacccgtagacgttccaaagaacagatcgagaaccgatctaaagatcggatattcatggcaatctccgatgcacgtacataactatttttttatgatctttatcaccactatgaccgattaactccgtgtacatacatacttcataaacacgaacagattctgattattcatcaaggtcaggggtctgcataccagattttaggaccccggatgcaagtttcccgatcggggtggcgccgctttctggcgcttagggtcctgttcactgaatatctgacgacatgattacaacatagggtctttgttcagtgacacttgattctggacttcaggtttatttattgaggggatcactggtttcgaattaattgagtagttaccccggggcctcagccttaataactactggtcagttacctgattaggttagaggaggcttaacattacgtaaggcgcccctctgttgggtgccgaaccttggccgaactctagagatatagcctttttagcctcaccttgtccttcttttccttttttttttctttttttaaacagaggtacgtacctggatgtttatatggttcctagccagaggtagaaccttggaaccagacctggaatgccttaaaatatgtgtcatgtcagtcggtactgcagatcacttacttggacgaacttagatatatatacatattgaagaggggaccctgccacgaaggacaggggcaccgacagacctgcctgcgaacaggtgtgagagcagagttgtcactggtagtagggtgctagagaggagaacaccatggggtgactactgagaagtgaaggtggaaaggtgtctgcgttgctcacatggccacttagtcatcctgctctggaaacccccactgcaatatatgatagagggtttcagttcaaagggccttggaaagatcaatctatggagaacaacgtctaaaaatacggaatctttcctgactctgctgtaaatctacgaatcttcggggttttttcacacctgtgcgaatcctttctgttccagcggacaacatggctgatattgagcctcttcgtacatgttcttgcgacagaaacgaggatggtcatcaagcgcccgagagtcaagttacatctgtgcatcaagctgtcgtcgaagggaatatcgagctcctcgaagtgctgattcgggatggagccgacatttctactacaatttcctcccgtgatttcacggcgcttcacctcgctgttcaggggggtaatgaggcggccacacgacttctcattcacgccggagcgaatgtttctgcgcccagttatgacggcgtgacaccattgcacaatgcagctgctggagattcggtcgcggtagctgaattactcgtcaagtctggggctgaaatcaacgcacggaatatcgatcacgaaacaccattgcatgtagtggccttgtttgggaactaccaaattgcaaagctcctgattgatgttggatccgatatctcagcaacagagtgctacgggaacacagcgctgcacattgctgccggccgtgagcatctcgagatagttcattctcttcttgaggctggagcggacgtgaatgctattaacaacaatggagatcccgtgctacatcatgcaggcagagatgatccaacatgcgttgatctgcttctcagccatggcgcagatgtgtatatgaaaggtgagggaggggacactttcttgcatcgggcagctgaaagctccgcggaactagtgcgtgtcgctcttggagccgatgccaacgtcgaggcaaccaacgatgaaggaaaaaccccattgcattctgcagctgcgtatggcgaaaagcaatcaatccgacttctactcgatgcgggtgcgaatgtgaatgcaaccaccaaaattggcgagaccgcattgcacctaatttctggcgattcttcaatagatgaatctgatgagaaagcaaggctactcattgatgctggtgccgacatcaacgcgaggactgtatcgggacaaagcgcccttgatcttgcaaaagacagcaatgctacagttatacaagtactatgcgaaagatagaaatcaaattggtagaatcatagtctcagtgtcgcaaatgaagtttacactagacaaaaaacatcaagtcacctacggagacgaccacaacgaagcaggattagaatcatgaaatgaaggtagtgcggtgtcgcatgacgtggaagactgtctttgacatgggtggcctgacctatgtctacatctattttcaagcagctagtgctgcttcgggtgtctattcgcttatagtctgactcggcacttgacattcggatataccctcgggtccatgggtatctagagcgctggtgccttggcgttgacaagttccaaggttggcagagttggcaacggggcctgaaagtttaacgatatataactaatcttcgtagctccactagttatgccctgatttatttatttgtaaatttttaaaggtgacatgagcagtcaaaaaataatagattctctctcgaggtcctctccaatcagaacatctttaccaatctttgacaggactagctcgcatgttgtaggcggagctcctcccaggaagagtcatccgctggatcaaccctggaagagccccttgtcctctggcactaccgagatccactctttcatctggcgaatatccgtaatctcggattgcagacgacctgattttgttcttcattttcgcatgcttagagcaaatatctatatgggagattctatcggttttgacttctcataaactacaggttacttctctccaatctcacattgcaagacatgggatatcacaccaggtctacgactacaaaagatacaaaagggtcgatatcacaaaccggatcaacctattcaactaattctgtcgacggaatgggggacaaaaacgaacgaccccatttgctgcaacagtgaaaaatattctccatgggcaaatctccctttcagaacagtccttctcttcaatactgcggaagatccagatttgcaaagaagagacattgaataatgcttggctgcaatttcacacggacgctcggtgtcataaggaagagggaggctcaccaggaagaaggcaagtgaccgcagacaggtcttgctatcccacctgctatgataaacgtatgatccatatgaaaaggcttttcaaagcgacccgaagttgctcgtctcatgtctggcatgctatcaagaacaaagtgctgaatgcggcagatctttgcgacagagatgatgttcttccactttccagctcctgcttcgggtcatcctcgttctcaatcgatctttaattggtctcgctcgtcacggtaaacacaccatgagccataagccccaaggaaagcgatctcaagactttctacatcaaaggtgtctcccgtattgaggctcaggtggtcggggggttgaaattattcaaaagccgtcgagctgaaacggagttgacattcctggtgacagttcccgcgcactatcccttaaaaggcgaactcactacacatctgccttggtgttctatatacccagcaccgtgataatcctgctctgcgcgttgggtgtcatttcaattcgatataaaaatagattgtagttcttgaataggaaccaaattaacgaggaaaggctgttccagggaaacctatataatctcttctttggccatttactacctcttggccagtccaatcactaggaatgaaattcaaggctggtaaaagtggtcgatttcttgagcagatgaaccatcaaaaatgccagtggacctcgggagcttccatctcccgattgacatcactcatgcgaccaatcagcggtgaaaatacctctgtattgtatgtaacagttactatacatatcgaggggaatcgaggctagaattttccacgtgtcttagcgccttctttcttgcctcaggccaaatagatccatacctgtaacgaactaactgactatgtatggatccaccgaggatggatacatctaccacgagactatatagccttgatcttagtacccaatatgtctatacgtgtcaggctctagcaatacatgcttctcatcttcagctacctccttctctcatatcgaggcctttccggctatgtgggaagtaagatcaaagaaacaaaacacgcgttcaagtcactctgtctccacttaaacttggcatgacagctgggatccataactagatacggagtacggagtagcgtcttcagccttgcaaaaagaagaatctttgatttttaacatgcagaatagatcacctgttcacagtaactgttatatcggtgttttcatactaaggatgcgctccaggtgcctctcgtctgcgtatgttgtactgggcttgataccaggatcggcaaatgtattcatctgatctactcattgttctttcgagttcaggattggtcatatgatactaccctgcgcagataatcctgttttatatgaacattcctcgggatctgaagggtaatgaaccttacagtactacctactttactacctacatacagccgcctagagcctctatgacacgctgagctcattcaagtctcgcttttgattcgagtcaagtgcttacgtggcaatcaggtttgtgtctggccaggactttaatatggtatgatatgaaccagtcggaaagcggaaactcgcattcagattgcgtgctgtgtgctgtgtgctgttcaattctttgtttggttgcttgattattgtattgttgtattgcaggatttgattgcggacttccaagttccagtcacttgaaaggcaggattaggtcaagatgaagtcatagtcgagatgtacattgagtgcttcggatatgagtcaagtactaggtagtataaagagatgaccccacgttcttgaagcggggttttccaagtggccgagaatttgttcttgtctcagtcagattccattgtctgtttgtcgctgtctaattatagaatctcgtacttaggattccgttgcgcaacgagagaaaacctgccgggagattcggggtgggatcaaatcacctgtttttaggttggtttggaaggaaaggacgatgtccgagatggtatttttttttgcagtttaaccaatttccgatctcattttcgacggtgttgttgggcgttagtactaccgagtgaaaggcaaccttgcgaccgaggacggacatgagaccacaagacccaaagagaacaaagcaagaatacttcaggccacagcggactaatggctacccaaaaagacaagtcggtcgcaaatcacataaattaagatttaccatttacaatgaaagaagtattgaatcaagaagacagcattaaagcgtcttgtcatgagatgatgcgcgctaaggcatcatgttaaagggagcccccgtaatgtacatgcccatgactgatccatcaatcgatggtgagcagtagcatcgataaaaaagcaaaattgcgaagcaacccagtgccgaaacccattgatattgaaagcaaacccatcatgtatcgccagtagtcatgataaaaagataaaaacaaaccccatgatcgcctttcagaaaaccagctcgttgaaaagaaaaattacgagcgctcgccacggagacggcgggccaactggatgtccttggactggatggtgacacgcttggcgtggatggcgcacaggttggtgtcctcgaagagagagacgaggtaagcctcaacggactcctggagagcaccgatggcagaggactggaagcggagatcggacttgaaatcctgggcgatctcacggaccagacgctggaaggggagcttgcggatcaggagctcagtggacttctggtagcgacggatctcacggagagcgacggtacctggagatgaacgttagaaatgtttcaagtggattcgtcggcgacagcagatatgacttaccgggcttgtaacggtggggcttcttgacacctccggtagaaggagcggccttgcgagcggccttggaagcgagctgcttacggggagccttgccaccagtggacttacctatttgcgacagtcagtaaaatgtctcatgtccaacgcgtgaacgcgtcgcccatcctcaaggcggacacccgactaatcaggtatctgcagtgagatgaataaaatatgatagaagtaatacttacgggcagtctgcttggtacgagccatctttgatgatagacttgatgaaaatgtggttttgttgatgaaagagttggttggtggtggatggatgtaaaagggaagagagatgcgggtgggggaagagtatttgtaggagacgggaggggggggattgatctggaagggagccacgaatcagcgcacggcagccgatcaggatcagtcaggaaactcagcgcgtaggactggggactgcgcagcgtgtagcccagagaccgatttgcggtgagctctgattggccgagctggatcaaagtgctggtactgccaactaagcgagaggtgggccaatgagaacgcaggatcagggagtatagaatgctcaacccttgaattcttgatcttgcacccaacctcctttggatgggggagtcatgcatctgagcgtgctcaccatcatttggaatgtataatcctttctttttcctacaattttacattgttggtggcgggtgataccaggatcaaagaccgaccacggcaaagtcggcgagccaactctggggtctcccggcagatcaaggttggtctgtgatcctgcgctctcattggcggacgcgatccctagcgcgtgatttcccaatcctcgctcattcccgtatcatacaaatatcctctgtccacttccgtttcttttccctcttcttccatcaattccatcgacaacctctcaattaccaacttatctccatcccacttctacaaccccctttttcttctaatccatattcaatatgtctggccgtaagttcttaccccacacttccacttctccaacgcgttctaacgcgtctcatttcaggcggcaagggtggaaagggtctcggcaaaggtggtgccaagcgtcaccgcaagattttgcgtgacaacattcagggaatcaccaagcccgctatccgtcgtctcgcacgtcgtggtggtgtcaagcgtatctccgctatgatctacgaggagacccgcggtgtcctcaagaccttcctcgagggtgtcatccgtgacgctgtcacctacactgagcacgccaagcgcaagactgtcacttctcttgacgttgtctacgctctcaagcgccagggccgtaagtttccacgtatcttcccattctccaacgcgtctctaaccttcctcttcaggtaccctctacggtttcggtggctaaatcatttgttgttttcttttccgggctggttcacggtacgacgggacgttggggtgttctctgatttattttactgcaactgtcatgggtctctgggtttgcttttcatatcactcgattaccactattgcgcgtccatagtgtgcgcttctgagcttttctgtatcataacggcctctacattacggctggcaccatagacatggtgggatcaagcacataagtgcgatccgatacgaatacaatcaattaaaacttgaaataattgatgtctgttctgagtcgatctcgtggtagatgtacctgtacgttcttgtttattggcttctattttgtattttggtgcttgccactctatcgtcggtggcttgatctttcggtcttcgcgttgcttgacgcgttgttttgactgcctgaggctggcctcttttccatgcccaacatcaacccaccatggactatattcgttcgatctctgttattgacctagtgttcctagatcttcaaccttctatatgtctattctatcgtagttcattgtgttgctggttcttcagtacttccatgatgtatgcaggcgaccatatacacttccgtaacaattcatcatgcttttttgtagtttgcattcaattgcgtatgctgtgctttattttcatgttccagctatttgaatggctaactcgtatggtttgaagtatgtgtgttgttggaagagtgtgtgtagacgtagatgcatactgatttacaccgcagatatatatcaaaccaaacattaaaccatagagtctcactccgcgcacacaaaggcattgaactcgaacaaaatacacgcagataataaatacgcaagtaaaatactatataaatacttcaatagagccatatagaccccgcattgtggtgtggcgagcgaaacagatctgttacccaagtcgaagatgaaccccccaaaaaggaagttcaaccttgcttggcgctatgaagcatgacagattcggatctacccacaaccaagcggcaaatgcacatataatcgaaacatgcgacagatggatttaatattcagatttggaatagaaatatatggtgtcctttgaatgtcaggtgatggagactaatttatcatacgaagaccgagttgaaccgcctgaaacggaggtccatactttttttgccacccagctgcatactacaaggtcgagagaaataaatccaccaatacatttgaatagaccaacaggcctgcagataatacaaacatggagtacccaccaagagacgaatatacaacagagcactatatggtcaattagcaaccatccaagctagtataccctctactaataccaccacacagaccgaaggcatcgagcaatcaagaataaattaagtatgtcaataggtattttggagtgagactgggagtgcaatataggtattactccgaccacagtaggacaactatggaagacacatacccgaaccccgatagaccaaacggagtctagctgatatcaccttgctgacctccaactcgcccacccttggtgaagctgacaagacttggtcttctcattccatctattcccacccgcgagatatcgccttggattcaactgtcttaccaacaagctgctttcgcaggagtatgatataagccccaggctaggccgtggtatcaatgattttcccagttcattccatagccacggcattcccagtcggctatcttctggtccatcatcgccacagccaagtcataggaaaactgtggaattgttttcatcaaaccgtctgggagtttcaacggtagagatccctgttcggaccactgcctcatccttcccaacagtatcagattgtccatggtcagtttgattgccatgtcctgcaaccctctatcgctcccgggtgttgagttgtagatctcagtaatcgcatgcgtgaatgtctccaggtttatctgtcgggtcagctcttgattggccttggcctttgagagggacttcagtccttcaatgaacatccggtctgccagggagtacatcaaaatgtgaaacgatagggtgtcagatatgatcgctggcctcttggcttgttcaagaatctccatggcatccgagtccggtgttggtttgtgttgatcgatagagatgtctcgcgctgggcagtgaacttacgcccatagtccaggtggtagagatactcgatcatcccttcaaccaagagcggctcttcttgtagtacgaccctatttgtgaatgcctccttggttatattagtcgaggtgcaacactcatatgttgttctctatcttacctggaacccactgtcacaggctttggcaaagaaatccgatcgtgggcaaagtatgcacttgtgcacggcatattcatcgtctcgacacacaatgatcaggtcactgtatattggctcaacccgtatgctgtgatgacgttgattgtctttctggtctctgtggtagtatctggtacttttttaaggcgtccaaaagctccttggcagggctgaaatcttcattctctccaccttgatatgtagttcccaactgtcagattatcctggcgcaggtactctcgtccttcacatcgacgagacagtggtgagcgttaggtgtgggacgttcagattttattctctgcgttgaggttactgatgaaagtgagtgcagggtgagagatcaagagtgaaggatggtggggtcagctgatgagtaggtctgcattcttttaagagtgagagtatatgtgcaagttgatgtttggttacctggtctacctagccatcccaataaagaacaagaccaggtaagaccataacagccagacgtgctggtgaattgctaaccttttaatttgtctagagcctgcgtgagatcttgaaaaaaaaataaatttctatagttagtgagtggaatgaaaaaaaaagatagacatagcatgtcctggtttcgatccagggtcctattgtgagttagtttgatgtttgtgagtcaaattgggttcggtgaaacgtacctccgggttatgagcccggcgctcttcccctgagctaacatgctgatgacgttcgtgagtcaaattgggttcggtgaaacgtacctccgggttatgagcccggcgctcttcccctgagctaacatgctaggatgttggaaatttatttcacctttgacaacatagaccaagatatacaagagagatcttcctagaaattgttcacttagatatgatgagttctaacttctgtttaaagggctaccggtataatggaactcgtctacaggaactctggtgtctgcaactggacgtcacatgtctattgtttaccctctattccctattcatggaataaagttgccttacagcttactgcctcattgccaagatggcctcctgctcattgctggctcagataatttcagtaactacatgtccttgtgtcaccagggatacagaaaggtctctgcttccggagggtcgatgggtcatcagagacaacgctgaagtgcagtgcatacagatctcgtcgatgccgaataccgatgagcgtaagtctgcgttcaagagtgccgaggggaactggcaccgaatacattccaggagtgtcacgttgcgacccaaagttgcatactgagtgatactggtcgttgccgtgccaataaatatgttctataaatggctctgtatatacccggccacgtgctctctatagtcaacctctggccctctgggagctaatcaatagtcagatatcaacacagtagtaagtcatcccgttcggtaactaaactcacaatattgctctccacccgttgtttgtcctgcaaatatatcatctcgccacctcttcgaagcgttttgctatagccaacgagtgtttccaacttataacttggagtctggatgttttcgatctccttctccagcgatcgggtcttttcttggatgcacgagagctaggctggtcgactgtcagatgctttgccggtgtcaggcttgatgtcttccttgcaccgtaccttattgtatcttggtacaaccccgttggattgaggacatggaagcatgcgattcctaccacatttggttccgtaattcatatataaatataaatagaagtatgacgagccagatcaaggggagtgcttcaattcagcataaccaagacgagagagaaagtacagaagtgggagagggcctgctgatgaacgtatcagactacgcaaggaggaagagaaatgatcaagtcgaaagtgacaatcaagatatatagaagatgataatctagccacacttctgaagttctttaaatagcttcatgattcatcccacaaagctctaaagatctcatcctctagaatctaatagaagcatctctgcaggcgaagtaaagagaccaccgacgcagcaagctgaacgccaagctgcctgcgagaggaaaaaaagagagggaaaaggaatgccaaagagaggtctacaaactgcttggggtaacagtgaatgtgcccaaatgcatcaatagctggccacttctgcaaaatgaaagaatctcttgcttatacatcttatctacccaccaactagctgggatatttcaagggtctatcaaaagcacaatcacaagcaactaacctgtcctggagggtggctcatgggtgcttggtaatcgatggaatcctagagaatctatacggtttgagtatcagacagaaacacgacatagccactattctgtattataatcggagacatgtggcatttcggaatgcagggatagatcgtggttaggttccaaaattctagaataacacgtgtacataggcatcgaagtgaagaatgtgccattccttgctgtcatgagttgcatagccacgactcctttcccagcaaagctccttggagccttctttctaagttttcttgactcaaagtaacgaagcgcatagtataagcatacgcggccagcctcgaggatttaagacagacacgtcatgaatttttgaaggtgccaaggtgtgagtcagaataatcagtcagtgttggtaatccaaaatgccaaaaatctaaatcatcaataacaaaacgcgcaaagcaaaaaaaatcttgcatctgaaaacaggagcatggtcctccgacaatgtcggcgatgcccggaggccggcattccgggacgaaaatagaaagcttccagaagaacgaaaacaaccacgctttaccgaatgcaacactagcggcatgcaaaagccactgaaaattccttctggaacataccagaaataccgaatacgattacctgcagattgtggctgctccaagtgccgtacggtaacagataaccggaaaacttgaacggcgtaacggcagtaccgagaagtggctgtgcagccctagcccagcatccaatcatttacattgaaaaacttttcgctgctgcattagctcgttactaaatatgatcctgcatgacaatctcgcagacccatcgccgagaaacccggattaaggtgctgacataggttttatggtcgggattgcatgccggtgaaaaatttttctccgtggtcgtttgagtcttatgcaggggccctctattggtaatgaacaggatcgatgcctaattgagaaggaggttaatgtacatcgtaaatcatggtgccttcggaaggataatatatccccagatcttatacattccactataatctgagtgggccattggatctggatatttggatcagctgaggttggtttgccacttccccagactcggtaggggccacgtttcggtgcaccctcgaggaatccgccaagaccttccgggttttgtccacatgggaaagggagatcagtcgggtttgggccagactgttcggtaaatacggcagaccccggacccgagttcgcgcgtccagaccgagaaaatggaacctgccggtcggatttatttcgcgctagtggatttcaaagggagatcctcggggggtcacatggcatctggtggactattgctgcggcctctgttcttgcgcctacacgagatccaagctggaaacccggggtttgccggtgctgctcggttcggaggcccttgatctgcaatctgatgcactggcatttagtgcccaagccatgtgcatatgcacggttgaagatgacagcgctagacagaaaatttcgaaatgtaatccgcagtatccgtacataccacgctacccatggtgttccgcgtgctacaaagcccgctaacaacttagcacggagtatcctggagggatccgatcaaatcaaatatgtactctaattttatcgcaacaatttttgagtcaaaggggaaaacatatgattcacatgtgatcgagtcatggaatcatcgacagtactccgtgtagaccggaaaattaaggcaatcaccccacagtaaagagaccatgtgaccatatattagagccggatgggattgttgtgtagctcaggttgggcatttcccgccgagcctgtgagcttagtccaatagccaagcgcttggggaacaaatttgagacatggagagtagcccttagcccaaaaataaagtcaaagtaaattaaaagtaaagtaaataaccggtggtgactcaagatctggggtcagctggtcatcaagtccctatacacaaacaagatccatggaccagtttccaaattcagcttatcatgccatgagatgtacggaggatggtcagctgactatcgcgtctgtcgaactgcgagcggaatccgccgattggtgggtagtggggagacatcgcgagacaatcctagacaatcggagtaagacaatcgcaagttgggagaatattatttcgcagccacaatcctgagttatccgaggtttggaatagttgggtccgagtacgaagaaccaagaggaatgtgctttgcagatgttgtgcaggaatgaatgttgggaccgaaccattggacaccagccacatggcttgatctcgatgtggctagtatttacagaaaccttggaagtgtacggaggaactaagaatggacctcggctgaacaacactccgtccatttcgatgttgtatatttctgggcattcgaggagtaatgactcaccggaaatagcacataaggccgaatcgttagttcccaaccaaaattcagttacgcgaaaatggacaccaaaacaaactaaggtgtggctcagccctagggattcctcctcggcatctccacccccattttccaaattatggccctggtcacccgagtgcaaatcggagctagttctagactatgcgaccgattagttgattttttactgtcttttctaagcgatgtcttgcaaaccttggctgaatactcccggaaatgtcctacagaaatttaaaaaaaagtaatccttattaaatatgcagatctccaacaattcccattgacacccaaaagcccaatgacatagaatatagtatggtggagccgtgtggcttttgtataccgaaagccacaaacttcaccaagggaaagagcagatcagatcagtgggactcggtagaaatgggtgtatgtggtgatacgaatccagtcccgatgcggactagtctcgcacttgggtacaaataaaataataaaaatcacgccaaattggtcaataccgtaaatacttgttcggggtcaccgagctagtgaggtcatctagtacaggcgctctttattaaactccaacttcctcccatctttcaacttcattactcatacccccccccaaatcattattctgactcttgagatcatcatatcaagtaagattcgcttttcctccggccgagtcattctccagaaccaaactcacctcaaccatagtcgtctctattaaagttccagccctctactcttaccattcgatcagcctcccgacgtttccagactcttcgctacctcaagctttgaaccaaagtcgccaaaccagacttcttcaaaagcacggccacaattgatcaggaaatcttaatcggatcttgtgccgtcgggttctataaaagctcgcctttccccggtggcgaacacttacccactttctgacgtcccccaacaccgtgataacataatgcttatgtacccacgtaagggtctcatcaccgatccatacaaccctgagggcatcatcatacaagacgaccaatacccaccggatttctattctgagaacgccttgcactacgatcagtctcgtttgcagtcaccgttccagtgccaccccagtgtacagctctccccgccatcttccgcacctccctcgcctactttctcctctccgaccttctcgacttcttacccgcagacgtctgactgtcagtctttcggggctccttcgatgaccccagcgtcttcatataacccgtcatacgacatccagggttctaattcaccatcgcactacctgtcgcaatatcctcagcaatattatacgcccatgctggtacaacagccgctcgctagtaaccagggttgggatagcaacctgcagttgttgagccctgcgcgcatcccataccccggtgtgcaaaagcgatcctcaccctcggcatcctcgcgctcagctcacgcagcagggttgcccgccaacaactaccaccgccgctcaaacagcgccaacaagccgctacccaccccggtgcaaacccctctccagaactcattccttgcgactccattccaaagtttcgatccctcctcccaagatggtcacaatgccgaggccgagtctgccatgagaaaagcgatcatggaccaacagaagcagtcaccgcagcaaatgcagaacgactactccctggctccatcggcgtcatcgatgagccataattcaccggtgactccgcagactaccctcgatgaactcgacgatgcatccaagtcgatgaccaatggtgagaatcgaatttctgatattgatttatggatggaccagtacttacatttcgatcctccagaatacaatgccaatggtgccatgtcaattggagtccccaagctgaacagaacgatttccgatatctaccaagacgaattgtacaaccccgccatcatggcagcgcctcagatgtccaagccaatgggacagaatcacctcaacccgcgcaatttcattgccgatcgtcttcaagctgctaaccaaggacacttgtcagctcgttcgcaatcgcctggcggcagacgggatcgctcacctttccgtacttcttccccattcgccggtgatatgagtaacaacgctctccagcagccccagatggccaccagcgtccccatgggacagaacgcaatgaatgggttgaacggaatgaacatggaccagaccacaactggagatatcaagactatgtcccccaaggatgcggttttggatttccaagacaacgatgattccatgcctcctctgttccctccgggtcaggctgatttcaacctgggtgatgcgcttggcttgcgccgcgatactggcccaatgcgaccgatggaagcattccctcagtattcgacacctagcatggcccagccacagttcgcattctctgaacctcagatgcatcgccctcagaacctcttgccgcagggtaccgatttcccttcgctcccagcagtggaatctaccgagagctcgcctccaagtcaaatgaatatgtccattacagagagcattcctcgtcccgacaacacgtcttcggatgcgggcacctacacttgcacatatcacaactgcacagaccgcttcgactctccctctagactccagcgacataagcgcgaggcgcaccgacaaactacaccgggcggccaccttgtcagccgcgatacctcgctccgcaactcccaggctggcccgcacaagtgcgaacgcatcaacccgtctacaggcaaagcatgcaattctatcttctcccggccttacgatcttacacggcacgagcatacgattcacactgctggaaagcagaaggtgcgctgccacatctgtaacgaggacaagaccttcagccgaaacgatgctttgacaagacgtaagttttccccttttcgctttcaccccttaagttgatcatacactaattacattaattacagatatgcgagtggttcatcccgagatcgactggccaggcaagcagcgcagaaggagagactgagagcgccttccacgtcatagtcaccggatcggcatgccgaacgtcatcggtggacccatggtggacccactgggctccaccaaaaatccggggcttcgtcatcatgacgattcagctccctaattctcatgaactgtatcactatgcggcttccgattttattatgtgtacgattttacgttgatgatttgtttacatgcggttccccttttagcattggtcggtgtgtttttttcattttgcgtgttttctccctctattttgtgtctatgccatttggccgggaaaacaaacgggttcggtgttgtacatttctgttgtacatggtgttgctgcattttgaccccagtacagtgtgtccctcttgtactatagtacattcctctaaaaaaaaaatgtatattagcttggatatgacatgaatttggaaatgatacatatgtatatcactctccacactccctccgcactactccacactccactgtaatcgtgaaacaccctcttactttgagataatcaagggatagacttgaatcctcgtacccacttgcatcaaacctgcatgtttacccacatatgccagccataactagggactgttttaacaatctatgcatgtgttgcagtcttgcagatagatgtacattgtctgaatgtatcttgtgtatcgtagaccgattaaagttgacaaaaacaccaatgcagcacgagcaaagttttgaacattgcatgttgtatattgcaattaattaacatcccctacggatgagtcccgattcgcgctgatcatatattgtcctccgtactccgctccgtactctccgtattgcatcaacaatagaaattacctacattacctatcaacacattgtacattgtacactgtaccttcaatgccaacaagaagttagaacaagccggacgtgcaagtaatccatataggccaagagtatgatcccaccattgcgtagccggttcccagaaagccttggaacaatcccgcgcgcatccaaactctggcccgataagcgatttaccaccattctggtacccggtactggtgggatttctggtttgggttttcgagtgtcgacgtacaggaattgcacaagcacaattctagccccttcaggattctggtcccatcttttattgatggagttggtattttgaatgcatatggagtttcataccgatgtgcctccgggagtgtcatgccatatctcctatcttttactgggtgtgaatgttgctgtcattatctttggttgttatcgtcattaatgtcaattgaagctattcgagcgttttgtacgtatttgaaactatcgatctgcaattgtgggtatctatcttaacgtttaccatataccaataataagccgtataggtatatttacgttgtgcaccctgaaaatgatagacaagaaatgataaacagggtgatatacatcggtgggtccatggcttgatagctgtgggtcttcaataccgttgtgtattggggggtggggaggtggagaggtggaacgatggtgggtgtgtggctgaggacgaacttctgttttttaacgtaatctgccgtacaatcggcgttcctcatttattacataggagttcgtatatcggtggtgtgatagatggcttggcggcttattttgacttcagttagttcttttgcgatgcaccggtactatatcccttgcgtggtcgcatcatcgagggagtcatatgagatgtgaaacgtgagtcgtattactcggtaccgcccggcagtattgctatctcaactctccctggacttcaaagataacggcctatgctctgtctcatgcatgtgcatgctcgactgcatattttaatacgagaaaaggcgcctatatcactctacacgtgaacgtgctctgatcggctatagacaagtatgtatgaagcattacacagttcagtgcgacctttggtgtattccaacgatatcataacaactctgactctgcatccctcgctcgcatccggagctgagtatctccccatggaggaattttttgataaaatccccattatttccttaatcgttgcggcatctggcgtccacgtcaagctaccccagctccctggcccttcccagtcatttaatacaattcttgttgtgtctatcgaatacattttctcatcactgagtcgacgccttcaggccccatcgctgcctgatcatccggaaatatttcggatcgcttgttgctttttcaactgattctcgatcctgatgcaccattctctacattgaccaaatcccttattgacatacagactcgtcgtatcctccatcattccaattttcgcggagtctgttttttgctctacctacttcaacttaacccacccgtctcattctagtggcctgaggatctgtttccctatgatcctcgagaccttgaaatgtctacgggatacagatattgcaggtgcctaatggagggatatgacgaatgtctctgcagattttgtaatcgatgtgggagttttggtcatactgccatttactgcagagggaaatcccatgggggacgaagtggagggtatctgagatgctcacgccctacaaacgtgacgccgatgaatgatcttgattttattgacgatcatagtaaggtatgtgcgctgttattctaacgcctactcttcattacggtgctgactgaaaagatcccgtctcaggattcgcccaaagcgctatgcatcgaaaaaggaccgctcgccacaaagatcaccacccaatgaaattccaaatgccaaacgacgaaactggactgaggtggccggcattctaaataagactttgaacctaggacccgttgatcggacctccatcctagagcatttgatttcaaatgttcgcctcgaaatgagcgaaaggtactcctctgtgctagaggagttcgatattgctagaatactcgaagacagtctgagcccagtcgtgaagaatatttgtgaaaagggcaaattcgacctgatcaggcaagtttgacctcgaaatgcagagaaaagttgctaataaaaccttcatggtctcttggaaattggacaggatccagaaacgaaaaaagaagctggtgtatatcttcatattctatggagagaggatgaaacgacgaaacggttttggctttacgtcggacaagcatgtgtgctgtgtcttgaggatccggaaacataaagaccctagacatcgctggaagaatagaggtctacactacgcagtgtgggactctgccgtggatatgaaatcagcctttgtcactttggctattctcgacgccccattttccactaaaacgcagctagttctcaacctagcagagatgtggatgtgcctaaaattccaaacactgacttcccttcacctaggctcctggttgccgaaaagcacaaacgctatatggtcgggtaatcatctcaatgttgcattgccattatggcaaggattcactgatactcaagagaacaaagatatcaccgacgcaattggcggcagatcaacctttcaacaataccttacatctgaggattcagttattcgggcatgggcggaacaaaccagggatgcgttcaacgacatacgaaactcacctgaccccgggatcagaaattactggtgggatcttcacaaagagcgtatccttaaggcacaggacacctggggtaaaaagaaagctagcatggctaagcagtacctcgaaggggccaaagctctcgttacattgcattccggaaatcatggaaaccatcaaactgaggttagagctggtagtttcaggttcactgtttcataaacacttgggcttgatctccatgacggtgacgaagttattctccaatatcatctaaccccgactccacacccacacgcttattctctttcggcattgaaaacagatcctgctacccgcttgggggtttctatccgcagtcaagatagccatggaggttttcattgctggctaaaggcggctggagagtgcaattcacgaaaaatgaacacactcgtggacactctggaaggctattctgcagaagaaagccagagattcaagagacgctggtttgttactgggtctttgaatagaccaaatagtgatattataggaagaaataggtacacttgatattctaaaactataattttcagagttcagaaaagttgcgaagagccaacggattcttagtcggatccaattttggtatttcaaagtcagtgtaggatatccctttatatcgtccgttgttttcccaagagatcccatgttgcagaaattaaccagtcagactaacttatatagctgataacaatgacttgatgaggcaagtgacgttgagtatgtagagttagaacatcaaagaaggaatctccatgacacgtgcaattcagtggagtttcttggcgcgaaaaaagtacagatttgaagcagcgcactaataaaaaagataagagaaaaaaaaaagatagacatagcatgtcctggtttcgatccagggtcctattgtgagttagtttgatgtttgtgagtcaaattgggttcggtgaaacgtacctccgggttatgagcccggcgctcttcccctgagctaacatgctgattggtggaagatatatgcctgacgttcgtgagtcaaattgggttcggtgaaacgtacctccgggttatgagcccggcgctcttcccctgagctaacatgctgattggtggaagatatatgccttgggtaaaatatgtatcatgttttcgagaatttcgagttctatatatagtagctactagtacatatgttatacaaaagtacctcatcatctaataatttatggggtactagcttcacttttagaatatattgactagtactctgtagataattcttactactcaattagacttacacaggttattcacctttcgtaaacatttattattatttttatatctcaaagtagggatatatgattttcgcgggtgctggattacatcccatgagcatgttagctcaggggaagagcgccgggctcataacccggaggtacgtttcaccgaacccaatttgactcacgaacgtcannnnnnnnnnnnnnnnnnnnnnnnnnnnnnnnnnnnnnnnnnnnnnnnnnnnnnnnnnnnnnnnnnnnnnnnnnnnnnnnnnnnnnnnnnnnnnnnnnnnnnnnnnnnnnnnnnnnnnnnnnnnnnnnnnnnnnnnnnnnnnnnnnnnnnnnnnnnnnnnnnnnnnnnnnnnnnnnnnnnnnnnnnnnnnnnnnnnnnnnnnnnnnnnnnnnnnnnnnnnnnnnnnnnnnnnnnnnnnnnnnnnnnnnnnnnnnnnnnnnnnnnnnnnnnnnnnnnnnnnnnnnnnnnnnnnnnnnnnnnnnnnnnnnnnnnnnnnnnnnnnnnnnnnnnnnnnnnnnnnnnnnnnnnnnnnnnnnnnnnnnnnnnnnnnnnnnnnnnnnnnnnnnnnnnnnnnnnnnnnnnnnnnnnnnnnnnnnnnnnnnnnnnnnnnnnnnnnnnnnnnnnnnnnnnnnnnnnnnnnnnnnnnnnnnnnnnnnnnnnnnnnnnnnnnnnnnnnnnnnnnnnnnnnnnnnnnnnnnnnnnnnnnnnnnnnnnnnnnnnnnnnnnnnnnnnnnnnnnnnnnnnnnnnnnnnnnnnnnnnnnnnnnnnnnnnnnnnnnnnnnnnnnnnnnnnnnnnnnnnnnnnnnnnnnnnnnnnnnnnnnnnnnnnnnnnnnnnnnnnnnnnnnnnnnnnnnnnnnnnnnnnnnnnnnnnnnnnnnnnnnnnnnnnnnnnnnnnnnnnnnnnnnnnnnnnnnnnnnnnnnnnnnnnnnnnnnnnnnnnnnnnnnnnnnnnnnnnnnnnnnnnnnnnnnnnnnnnnnnnnnnnnnnnnnnnnnnnnnnnnnnnnnnnnnnnnnnnnnnnnnnnnnnnnnnnnnnnnnnnnnnnnnnnnnnnnnnnnnnnnnnnnnnnnnnnnnnnnnnnnnnnnnnnnnnnnnnnnnnnnnnnnnnnnnnnnnnnnnnnnnnnnnnnnnnnnnnnnnnnnnnnnnnnnnnnnnnnnnnnnnnnnnnnnnnnnnnnnnnnnnnnnnnnnnnnnnnnnnnnnnnnnnnnnnnnnnnnnnnnnnnnnnnnnnnnnnnnnnnnnnnnnnnnnnnnnnnnnnnnnnnnnnnnnnnnnnnnnnnnnnnnnnnnnnnnnnnnnnnnnnnnnnnnnnnnnnnnnnnnnnnnnnnnnnnnnnnnnnnnnnnnnnnnnnnnnnnnnnnnnnnnnnnnnnnnnnnnnnnnnnnnnnnnnnnnnnnnnnnnnnnnnnnnnnnnnnnnnnnnnnnnnnnnnnnnnnnnnnnnnnnnnnnnnnnnnnnnnnnnnnnnnnnnnnnnnnnnnnnnnnnnnnnnnnnnnnnnnnnnnnnnnnnnnnnnnnnnnnnnnnnnnnnnnnnnnnnnnnnnnnnnnnnnnnnnnnnnnnnnnnnnnnnnnnnnnnnnnnnnnnnnnnnnnnnnnnnnnnnnnnnnnnnnnnnnnnnnnnnnnnnnnnnnnnnnnnnnnnnnnnnnnnnnnnnnnnnnnnnnnnnnnnnnnnnnnnnnnnnnnnnnnnnnnnnnnnnnnnnnnnnnnnnnnnnnnnnnnnnnnnnnnnnnnnnnnnnnnnnnnnnnnnnnnnnnnnnnnnnnnnnnnnnnnnnnnnnnnnnnnnnnnnnnnnnnnnnnnnnnnnnnnnnnnnnnnnnnnnnnnnnnnnnnnnnnnnnnnnnnnnnnnnnnnnnnnnnnnnnnnnnnnnnnnnnnnnnnnnnnnnnnnnnnnnnnnnnnnnnnnnntgacgttcgtgagtcaaattgggttcggtgaaacgtacctccgggttatgagcccggcgctcttcccctgagctaacatgctcatgggatgtaatccagcacccgcgaaaatcatatatccctactttgagatataaaaataataataaatgtttacgaaaggtgaataacctgtgtaagtctaattgagtagtaagaattatctacagagtactagtcaatatattctaaaagtgaagctagtaccccataaattattagatgatgaggtacttttgtataacatatgtactagtagctactatatatagaactcgaaattctcgaaaacatgatacatattttacccaaggcatatatcttccaccaatcagcatgttagctcaggggaagagcgccgggctcataacccggaggtacgtttcaccgaacccaatttgactcacaaacatcaaactaactcacaataggaccctggatcgaaaccaggacatgctatgtctatcttttttttttttgcgttcttcgctttcacggtaaatttgcggtatcatataggattctacattgactgtagctcaagccattgcttgcatgtcttcttttggactttgtatagctttcttcaggtctctcctaaataattaaacctttatatggaggatgtgctggatatatatcacctcttaccttgttggtatctagatgtacttttgtaattgtttcatgaatcgcattaaaaccccaactattcaaacttcatatcagcagaggtattgcgatatcctctaaattactgatagaaaacagtcccaatattttcccaagtttggtaatagccctacatattggtccccatgccaacttactctgtttaattgggtactctcgttttgatcgagtacaagcaggcctatctcgatcacacaattcattattctcaaacacaagagtttcatgctgtggtgcaacttcccgctgcctcaggccatcaccgacatcaccagctctacacgacacttagacacagtggaagtgcttgatttacgtgctcctacaatcaacgcatacagtgttacactctgggcttcatatcctcgactcaaagttataatttaaagacttcaacccatcgccgatcatcctgggggagcggaactccaaagtgggggccaaagagcgggagtctcctatctggcatttatatccatcaaagaaacataaatcaactccaatcctgttgatttccccagcataaataagactctctgccttcataaccccgaacatccccaaacaagcaaattagccagtgtcggggaaaaaagaaaagaaggaaaaaaaagagggtcactcagccaacctgaaacgaaccacaagcccacaccaacccaacccaacaaaccaccctatacagacaaaatgggccaaaaggcctccgtcccacaaccgggcgcgcaaattcaagtcatcggcgccgggctaccacgcaccgggacctcatcattcagcgaagcgctagaaatcctcctaaacggaccggtgtaccactgcggcacgcaaatatcgaaaggcccacctggagagataaaaagctggatgccaattctgcaaaactggctcaaaaaagacgacagcgcaaggcgggaaaatatgctcaccctcctgcgccaccaattggccggctacgtcgccatcaccgactccccaggctccgagctcgtcccggaactcatggagctgtacccggatgccaaggtcgtctgcaccacccgcgaccccgtctcatgggagaagagtatgctccacgtgcagagtttgactggcgtttggtttgcgcgtgctgtcctgctcccgctggacgggttgagacattttatcccgtatgggtatttgctggcggcgctgtgggagaggctttatggtggtgttgctggtcagcatggtcgggagacctatgcgagccatattgcttggctgaaggaggttgtgcctgcggataggttggttttctttgatgttaaggatggatgggggccgttgtgcgaggctctgagtttggaggttccagttggggtgccgtttccccgtatcaatgattccgaggctattgagaggtctattaatcatcatttacggaggggtcttgcgcactgggcttgcatatttgctgtgtttggtgttggggtggcggctttccgcatgtggaggtgagacgagggcgagacaattgcatacatgtgattgaaggataagaggtgatcatttggttgcggagttggtattttgaattgtgcgattttggaaactctttggttggtcaaactccaacattcagcgacttgcatacattggattatgttggtttcttcaggcccaggtggagcatcaggcaaaaactcactacgatagatcggcttatacagtcatttacatagccatttacacagaataagatatatatgtcctttggaacatgcattacaatatatgaaacgaaataaattgcctaaatgtcacaaataaaattttgtacgccaacttttgaactcgtaagcataaatccgacattattaaccagttcgctcgagcgatgccgagctttcccttccactatcatttatttcaaaggtagtttcgatcttcgtgtgagtaaagatcctgtttttagggataatacgctccttgctggagttggccccgccaatgttgttacccatgggatcatcatccttgctgtcgaccgtgaacatagtgaggctgttgggatccctggccttggagaatctagatgcataccacggagaagtgttgttgcttgaccatgggttatacttattcccactgctgtattcgccgatgaagcgaggcacgaagtgggatgcaatcgccttgaatgacgggattgaggcagcgaatatgccgacgttggtttcgataacagaccaatacatggaaccgctgatgacgtaggtggagtccttcgagctaagcatggcaggaatgtaggtaattcgaatgatcgaggagatgcaagcgctgtagattaatccgttagcaagcatccaggcggaggtacttgggtagacttacaaaagaccaagacagaggataaaggccaggacaaacttctgtttctgaggcatctggagatggaagattaccttgacgggcaaggtataagtcatgagatcggtgacgatgttcaaggcggcgttgcatagatagaaaatgttgatgttgacgcattttccagttccagttccagtccaggccatgctaatgggtcgacattggaatgcagccacgagaacgaatgagatggcttgtgctgcgattactcccatcataacccaggataggcgagtgagatagcgatctccgaggcgagtatagaaccacaggacggaggttttgacgaatccaagtgttgcgagatagaacattgagctcagccagacagcctggggaaggttagaaatgcaatgctgtacaatttcgggatacgcatccttacaaaagaatagtcgacgatcttggtctggtcgacatccgcaaaatgttttccaagtccatgtttgaccgctaattgatattagttgctgcaaaaagtcgtaggaaaagctagaacataccgatgattacgacagctataaatgcccatgacaacgcctatttccattagtatgatattgtaatgacaatgtcaatgtctcttacacaagcgcaaataatgaggtctggaagatgtcagtatggtgttggtaaaatagatcaagcataatctacctacagtcgtcaacgcccatttggcccaagacataaaggcgtgcgaagagacgaagagccaacacaacgaaggtcaaggtggcaaaggccacacagacgcccacgaccatagggccttgagaaccattggcaccagccatgacgaggaatatggatgatacaagcagaaataaaaagagagagaaaagaccgtgagttgacgtaaagaaggaattagactagatgaatagtatagatagttgtttcacatatcccatcgagaacgaatgatcaaatgattagtgtaagcataaacgaaaaaaaaaagaaagaatgattagcggtaccccagcttatgggctatactacacatatttatccctaatgcccctggtactagtttgaataaaagtctgcgcacactacggatgtgaatcctgcatggatctagtagccttggagatccactgtataccataaaaaaagccacaaaagaagaaaacatcgtaacacttctgaagccacacgagacagactatccccacaactaaagacattcatcgacctattcgggctaaaatacgcatgccatttatgggtaggctcccagtctcaagccacttacgaaaaacaggaagagccctaaggtgggttttctagcgctgtgatttgtcactcagatatctctagttgtaggtgcaactgaatcatgctttggcaaatgaagcagcaatcgtttataggaacctttgttccgggacaatgagtcattgtgtataggcagtaaagacatacacctgatcgagttggattggctcgaacaagtatcgtgggtcgacacatttgtctcgaagacgattattatcattttctaattattggaaagttcaccaagtagaaaatccttatagccaataaggaagcaggaaaaacatggaagaatagaaaacgagagtccgtgagttcccgccgaggtggagagatctgatttatttttgttctcatgcgatcgagatgttcgatgctgatcaatatcttgatactaatattaaatagtaactagtatgtcctagagtgaatacgttatacggagtgatattgtgcttgtatagtcccgataaccctaattccgacggacaaaagcaactagaacatagcaaacccagcggaacattgcttaaaaatttagacgaatcctgccagatattaataatgtagaggaggagctcaccgatctaaacgattcagaacccggggagctcttgtctatgcgcctaattacggaatatgacggagtaacggacgatggatggcccatagtttgaagcctcacctcgatctggacgactccagttgccttccgagcccgttctgagcggagagtgggtcgtttaataacttcttattaagcgagattggctaggttaactagttaactagaatgtgaagcatcggtgcatctcatatgacatcaaaaacctacactgcacattcttcaaggtacaaagtgtgaggaaatggaactttaatagttactgcgtacatatcctatgttgtacatatcaagagccttttcgcaaatattcttagagatcgactagcaattttttatcctactagaagtgcttccaagccaacaggattaagaagcacgatactccgtatactccgtgcaaccatagaaattatccgctttagcaaatagttgatcactagggcttggtctgtctcatacaataaacctattttatcttttcccctttttgggaaaccagtggagaatcaaaagtcggagtctaactcgttccgagtctcctaccgcgttggtgccctgactagtcaacgatattaattccctcatctctaaatgttgaaactaggtaccttttgtatgcagatgccatacgaaaggtacaaccatagaaaagctacgatatcgatttccccaacactcaactaactcaaaaataatggaacatactccgattggaccgttcatggaaaaacactatacatatagattatatggcacgatcttttactttgtgtagttgtggttcgaatcctttgtgacttttgtatggaattccctacaaaagatacctacttctggaatttattggaattatcgtgacagccgagatattccgatttcctgccacgattgttgtaatccgggttgatgaaaatttcgcacgagagccatcatctgcaactttatttagtcgactccatatgaggacagagaccagtgagaaacactggctatctgtagtggagaacgccagcctcccgctccaccttagtgcgatgtactccgtcattccggtctggcccagtgcaaatgaccctagagaaccttgaaaggctttgactcacacccggtgagaaactgccgagcaactaatcccctgcgctggttgttttaaatgttcgtgggcaacggcgcctctgaacggcgcgcaccgaacccgcacggccccttgacagttggcaacgtctttctccatattcagaatatctttactattctaggctactaggcacatcacgacgggatgtgtgttttccaggaataaccgcaacagtggatcagcccaaagacgcgattccttagcaagcggagtcgcaatccttcgacgatttaccgatgcccttagcgcaaggactagcaccaagggggccagatgcacgagctgtcacacgccgaggatattccaaccgttgagcccaggtttggtctaggcttgattccaggcaaataccagcatcgtcaggtgttgttagctcgacatagccttggccaatgacctttgggcccttactactacaacgaatatgctgtttagtgcgaatattcatccgcggtccttcatttccggaggggttacttcctccctctgtcaaaaagacatgtctgcgtcctccatgcatctgcatccctaatccgccatgggtcttgcagaaaatgtcctgtcactggtgacggtgaccaatgtcattttgagtcttgtggcctatgtcacgctcaagtttgcctggcaagttatttactatcgcttctttagtccgctcgcgaaattccccggtcctttctggggctctgtaactcgtctctggatcgcatggcataatctgcaggagaccgaggtaccaactgtttatgcacttgctaagaaatatggttggtcttgattatatatccgaaagaaatggctttctaacaagtggacatcttaggccctgttgttcggatcaccccaacattgttgctggtcagcgatcatgaaaagctcccggaagtctaccaccgcaatgcagacaagaccggacactacattaccggaagctttggtgagaccgagtctctgttcaacatgaggtctcataagacccatgccgtgttcagaaagcacgttgccggaccggtatgacgatatgcgagttcaattgcagatatcaaaaaatgaccctcaaaatagtacagtttcagcaacatcaaacaaatggagccactggttgatgtgcgcatcaccgaatggaccaccaggctcaacgaaaagttcgcgaagagcggcgaagccttcgacttcgcctggtgggcagtgtaagcagcgcacgcgccaaatgaaacaatgctccgactaacaaaacaaccagctacatggcctacgacatcatcagcgaaattggcttcggcgagcccttcggcttcatcgaaaaaggcgaagacatcggcggcctaatccaaggcttccacgacggcctcccagccttcggtctcctagcccgcctgcaccccttcacctcatgggtaaaaaccaccttcttgaaaaagtacctcgtagccaaaccagaagacaactccggcatcggcgtgctaatgcgtttccgcgaccggctcatcgaccagcgcatcaaggagatcgaaaacggcaagaaaaccgaccgcacagacctgctccagactttcctcgatgctctcacagaagacggaaagcccctcgatctggagtacatccgcgccgaggtcctgctagtcctgctcgctggcgctgacacaaccggcaccgccttccaggccatggtgcagtttctcatgacccacccgcaggcgtacgagcgtatgatggcggaaatcgataactccgcccgcaagggtctcatctccgatatgccacagtacaatgaggtcctggagcacctgcctttctatgttggctgtgtgaaggagactatgcgtctgtgtccgtctgcgccgaatatcttcccccgctatgtccctgagccggggctcgatctttatggtcgctttgcaccggtgggcacggaggttacctgtaacccgtacctggtgcatcgggatccgaggctttatggggatgatgccgaggagtttaagccggagaggtggttggatgctgagaaggcgaagttgtataataagtataacttttcgttcgggtatgggtcgcgtgtttgtttagggagggatattgctatgatggagttgttcaagggtcctttgcaggtgagtctttttccggctgtgctacgtgctatcctggggcgagtgctgatttatcgtctagttcttccgtcaatacaagccggagactgtaaagggtaagcccgaggctaagctcatgaccaaaggtggtattagctactggagagacgtgtggttgaccatctctccccggtcagaggtgaaggccgagggaaggcttgattgaaggttgggtctacatacagacagaccggaagataatgccggtctaaaaaacgctacattccatttgcacaggatacagctcaaaaattttcatttctcaaaaattcaatatcaatttcccggttctgagtcattgccatccatatacctatattgtgtttctctattgtagtgtcgcgcagaaccaaagcatgcgatcgtgctcatttgcccacgcggcattcttgaccttggccagttcctcgccgatatatagccccgcctcgacgctccatcgcgtccccgtcgcctgacccacatcgtaccagaagcccttgatcgtctcgacattatgtcggtagttagatcctgccgcgacgtctttcatcgcataggatccgcccagcgtattccctaactgacgcgcgacgatcatcaagctgggtcgacggcgacagagacggaccatatgcgtcgcgacgcggacctgctggtcatagtcccacaggtggaagagcgagctcgcaaagacgacgtcgattttcccggctaatttctggaaaatcgggctcgcggggtccagacagtcgggcgagctcaggtctcccacggcgaaagtggcgttgagacggtctcgatcgcggaagagctggtatccgagatcgataaacggttgctctatatcacatccgtagagctggtcgcccgggatgccctggtcggcaaggaaacggatctcctgaccgaaacagcagccggcctcgaggattccggcggttggatcgtcgcggagacgggccagtatgcgctggtagactggatggtggggtagctggaaggtgaggaagcgtaactggccgatacatggatagtggaagattgagtaggcttcgtcgcgctacggattggagatattaatgattgttagctatttgagagactcaaaaaaaaaaaaaaaacaagggaaaagcaagttgccgcgtacgagcttcaagacgtgcgggaggatttcgtccggatggaagccgctgtagctttctagcagcctctgggcctcggggttgatgctctggacctcctgctgataccattcgggtttcttctcggaccccatgattcttcttcgaaggagggagtaggtatcacaggggatgatgatagatgaataaatgtactgctatcatggctgccttttgtagtgagaggcacgccttaagagacctggtcgcagatcattgccgagtatcgcaggtggccatgcagtatggactagatctcactgttccttcggagatttagcggttgaaacaagcctgtaggctgatttcgctccccacatagcgatccttgcctgtgctcgctaatacagccgtttctgacctttaaagcagtcattgtcggtgtcaatcccactggtcctcgtattctagttgtcaacgggggtctaagatcaggcaaaaaccaggcattcaggcattaaatgcaggcatgcgaccttacgcgctataactacaccgtcgtaacccccttaatacagaacatggcctcctggtagattacttgcatgcctatgaatctttgcgttaccgcatttacctacgcgtcgaacctgcccaagtctttctctgcactcaacatcatgatgcgagccgtgcgaaacgcctggactattgccgcccatcggggtttcactacgtctctaccctccattccttgttaccgaattccccgacggtctagtccgagagccatagttgtgtcgcatcgaacaattatgtcgccgccgcagtggacatgcaccccgaaagtgttccctacctcgggactcgaattgcttgaccaatccatcgagcttgaggaagagacactgtcggattatcaaccggagaattattatcccgtcaaccagggcgaagtattcaatggtcggtatcaaacaattgccaaaataggatacggagtaacctctacagtttggcttgctgtaggtgtggtgggttcgcttcagcccaaccagatgatatggttctgatagcattccttgaaccagtgcatcaacatatgttgttctaaaggtttacgtaacaggccaaaaccaggcctgcgagcgagagctgcacatctacgagcacatgaacctggtggaaacaaaccatcctggcagaaacttcgttcgcaaacttatcgaccatttctatatacagggtcctcatggccgtcatatctgttttgttcacgagcctctcggaacgagtacagatattctagtgaagatgttctccgggcacaaaatgagccttgatgagatgaagcccggtatccgacagctacttatcgcattagacttcttgcactcggagtgccatatcatcaatactggtaatgatcaatccgcctgacgacttcatatcataggcctaacactgttacagatattcagctgaagaacttactacttcctggaccggagacaagcgttcttacccgattcgaggaagctgaagttgcagacccatcacctagaaaaatgctcaaaaaccgaacaatctacaagagcttaggtttccttccaaaaggtgggctgccgatcctcgctgattttggggaagctcgattgggcgacgaaggacatagtgatgatatcatgccaaacgcttatagagctcctgaagtgatgttgagatcgaactggggttataaggtggatatatgaaatgttgtcatggtcgtgagtggaagattctaacctttttaacgagaaaatgctaaaattttatatttaggcctgggacattgttagccctcgcacccttatcagtggcaaaaatccagatggcgtctttgatgaccgagttcatatggcggaactggttgccttgctaggccctccgccacctgtattccgggaacagagacaccccagttcggtctactgggatgagtcaggcaattgaaaggaagtagtcccaattccagacatcacttttgagaggcttgctgagaaggttgaagggaaagacagagaagggttctggttcttgtggtggcttcggatggccttgcagtgaaaccccgaggaccgggcgacggctttgaaactcttatacgacgagtggctgatggaggggctgtgatgaaagggctgggggaatgaggcagggatgagcaaatagtgggtgaacagaagaaaggtggcagttcgatatgtaccctactcaaccgctgcataagtattccaaagctatggaataatagccttatgctattaatgatattacaggaaccatcatgaattacacaagcgaaaaaatgtcactcaaatggcgctatacctgaagtacatagtttaaacaggtgtgcaaatagggattctcagctaaaacatcaaatagatttgtgggttgaggatgtgccagcctccatgtaagacagaaactggtgtagcctggcatcgagcctcagtctgcatcgcagagctgtacgcaagaaagtcgccatatgtgatagttgtagctgggtccttgagtagacagagctcaccgttccagatattgatgattgtatcgaatcgaggcagatactgcagctcctgaaacatcatgataagcgcggtgtatggggggggatgtttcccttgagttctctggtcactttgtagcgatatgccagggtgttgatgaattcctctgggtcgttgaactcagagaggctggtaggacggagacattgctcgacagcagtaaaccattcgtcaaaaccgcctctgtctttaagaggtgcgaggggacagaatatgccgaaagtgcctagctcgggcagatgggttgactgatcctcatcggcagggttctccaaacaagcttcatcccagtcgcgcttgtttcgtgcgcctgggttagtttttgtgccaggtgcacctgtggcttgagcttcgctgtcactcattgtgcatcagaagtgttgttttagagaagtttctcgaaaggtggaaaggcggatgagcttacagttcggtaagacaaggggtggaaaccaggggagatgatagatggttgatggaagaagggaataagatacgaaagagaataagaaggttaaaaagggagagatgaccttagaagagaagacaagtgtcgaggaaggtatggacgtgtgcatatgaagacagagagcaagcgcctatgtagtgcacttaggatggtgaatagccaacctaccacgcagttgagatcaaaacaaggactgatcctgtctctaagatgccatgaatgacaacaatatatctacagatgttctttaactgctcacctagttgatcttccttcctctctccatggtgtctttccatcttgccttctctacacaaagcgtaatatggagtatgatacaatcaaatggaatatgtaaatgagagctactgtatgaacacgaaaaacaagatgtaagccaggacaaattttgttgaatgcttttagtaacccgacacccaccgctagtacattggaacatggtatggcgtcaaatatggcagatagagagaaaatcccgagacattcaggatgcgttcatgatcattcagcagtacccatgacggcatcctaaacaaagacagtgaatgttagtaacggagctagagagtatgggtatatcaaggtgtttgcttactcttgcctcatggtacaaaggagtgataccggtccagtgaacaaactggtgcacaccctgtccaacaagagcctccagtccagggatggtactccaacccgcatcagatgccagctgcatcaaggcggtgacagtaggcttgtaggccatctcaagaagaacacggtgcttgccagcgtcgggagacttgccgatgagagtgccatcgacctcctgagcgcgctcgaacatgtggcagagcgtctcgcgcatggcagggtcgatgggacggtcggcggggatcgtgccaatagcgacccggggaacggtgtcaagctgggcctggttgtctacaacgcggatgttgtaggtggtcgggaaggtcgagaccataccctcgagcttgctggcgtcacggcccaccacgtagattggggagaagtgcatgtggtggagggcgaagatggcagcgcgggcagtaccaccgccgccgatgacaacagcactctcgttgccgctggaaccgtaaattcctgtattccgcatgcatcggatcataccttgccaatcggtgttgtaaccaatcagacgagggggcttgtcgccgttggggacgggcacaatggtgttgacggcgccgataatttcagcttcctgagcgacttcgtcgagcaggggcatgatatccaatttaagggggattgtcaccgaggcaccaccgaagtcaggggcgcggatgaactccttgaggtcttcgacgttggcagtctctagacgagagtactcgtggggtagacccattttggcgaagagggtattgtgaagagcgggagaccgcgagccggagacagggaaaccgcagatagcgaacttcttggccttgatctcacccatcagggagagaccacgacgaatctctgcagcggacagctgaccaggtgccgccttgaaaggaaggctggggtgagatacaggggtcatgaagccgttcaggatacggctgagctggccactgtcgcccatgttgatcgcaattagcggcacgtcgtgggcttcttcagcccatgtcttgaacttccgaagggcagtgttatcatcaagggtattggcaacaccgacgagcttgatgatatcgccgtactcaagagcacggttgtaggattgcatccaggacatgttggcccacgatagagtgcccttgggatcatggtgcgaggcgatgatcttagagtaacccttcatctcagtaacggcacggagcattgcatcggggaacgcgatctcaagatccacgaattcgcacccagaacggaacgctagtcggtacagctccattgccgcatcatgagcatcatcggggaagcggccaccttggctcttggtgcggatggtgaagatgagcggcaaggtggtacgacggcgaaggaaagacatttgttccatgacgtagtcaaccgagggaatatcgccgtcaactgaagggtccttcaacaggtcgacccgcagttcgacagcatcagacccgacacaagcctcagtgataatatcgcccgatggttggagatcaggcagagtcaatgagacaaagaagctgtgcttcttcttcttgatgagactaaggctgtctatttggccagtgactacccgcatgaagcgggtaaagtcctccgaggcaagggctagctccgttgaggtcgagtgctgactatagtactggatgttgctgcacttttcgaaccaaggcttacgtcgtagccacacgcccatcatatcctccacgtaggcagggcgggtcttatcaacttggaggaagtccatcaccagcttgatgttgcgcatgatgaggagcacgttgcccttgctcttgtggtagtcggtaagtagttttcgtgcctccggcagttcaacaacacctccgccgcaagcgaaggcatagccagtaggatgatccttaaggacacgccgaaggacagcgagttctgcatctctgaatccctcccagccgcgtgtcttgataatatcggggatagtcgtaccctcggaagtctcaagctcagtatcaagatcgatgaaccgacgaccaagagccttagaaacccagttgccagtggtggtctttccagcgccacgcatcccaatgatgaagatagaggcgctgctccgctccacttcgctcgagacagcatgctcggattcctccaattcttttccagtcaggttcacgctgaacatttgcttcaaggtgtcccaccagccaggccaggtcttaccaacgcattctttctctagaataagggtggactggggagcgacaagagacaacacactgaaactgaacgcgacacggtggtcatcgtaacagaaaataccaccggatggctggcgaagggtggaacgatcaataccgtcgatctcaagcccgtcgtcatgctcacggcacaccacgccgaatttggccaattcatctttcatagccttgatacggttacattccttgacacgctgatttgcgataccgtagatacgagttgtgtggtttgagcccttgccccgggcaacggccgcgagaacggaggcagtaaggaaggcatctgtcatgggctccatatccacattaggcagcggctgcaaaacgccatcagtaggcccagtaacagtggtggaagtatcggtctgtaaaacggagcagcccataggccttagaacatccactgcgaaacgagcatcgccctgaagggacttggaaccaatgttagggatagtacaagtcgtgccagtgagggcagcaatggccaaaggataggtcgcagagcttgcgtcgctctccacaacatattcagcagggttcacgtagtgagcctgagggatgtggtaggtgtgctcctcggtagtagacttcttcacgtcgatgccgaaagatctcatcatcgcagtcgtcatgtcgatataaggctgtgagatgggcttaccaccgaccagcttcaacgtcaccggctccttggcgtatggagcgcacataagcagcgaggagacgtactgagaggaaactttagcggccaggttgatctttcctcctgcaaaacctccagaagcggcgatcttgagaggaagacatcccttgctttccatgtactcgacaccggcaccgttgacggtaagagcgtcgacaaggtcgccaataggcctttgcttcatgcggttgttgccggtcaagacactcgagtcgacactgctgggggtagcgagtgtagccacagtggtgaggaatcgtgaggcagttccggcgttacccaagtacaaaggcgtaggacttgcgatgatctttccgcccttgccgttcacaacaagaacttcaccttcctcctcccaagagaaagttgccgcgccgagtcgctctagggcattcagcatgacctcagtgtcgtcggagtgcaagagattcttgatgcggcaggttccagaaccaagcgcagcaagaacaagggcacgatttgagatactcttcgatccagggggtgcgcaagtgacattgagcgacttgggcactccggggtgaacctcaatactgggagcaaggacgacaccaatatcctcattagagacgacactggccttcggctcgtgagtacggccgattgctgacaagagtacaaccttctttttgggaccatcattcttcttgtccaaagccatgttgaacagcaactggtctactgagcagtgcttaccagcagtcaacttacgaacccgtggatctttcatggaagtgggcaagccgtaggccgagaggcactttaccacacgagcaacggcgactcccttcaggatgcccaagtgtctcgcaagctctgcctccttcaccatgccgattgcgacacattcgccgtgaagaatctgaggcgtaaggatcgcctcaatggcatgcccaatagaatgaccccagttgagcaggttgcgaaggccgccttcacgctcatctgcggagacaacaaaggccttgtgacgtgctgatgccaagattctagccttcaggatatcccggatgtcgtcgaagcgaccttggccagcctttggctcgctgcgcacagcagccaaaattgaatctgcgttatcttccaaggcagtgaactcctcttcacttgaaatagcagcagtcttgatgacctcggccatgccattgatgaactctcggacggggagagtctcgaggaactcaagatcaatgtagattcttgatggctgccagatagaaccaataaggtttttaccaagcggagtgtcaatagctgtctttcctccgattgaggagtccaccatggcaaggagggtggtcgggacctgcacgaagcgcacacctcgcatgtaggttgctgcaacgaatccagtcaagtccccaatcacaccaccacccaatgcgatgatcactgtgtctctaccacatggtggattctggcttagcatccaatcttcgatgtcggcttttgtctgccgtgacttggagctttctccgggggccgcattgtggatgaggagccgcgggggtggggtgatggaagcagcggcagcctcaaaagtcttttggaaagtaggggtatagagagatccgaggttggtatcggtgattaggacgtaggtcgtcgaggacaagccactgatcaggtcctttgcgacaaaattgcgccaaagaccaaagtcagcgacaatgctctcccggcccaagatgctgatcttggtgggttcagacattgcggaggaggatatagataaggacttggtaatggcgaagttcaatgactgctcaattcattctgtgacttgttagtaccctgactcacggtactttatctgtttccggccacaatgaatctagggatacaaggtgcacaccgatcatttggaggagagtgaatgattagaggagtttgaccaacctggacaaagcttatccaagagccagtagtgtatcaagagaatataatctccaagtcaagaaccaactagacagaaaaggaagaagagtattgctgcccctccggtgtcgcgggcagtttcttgaccgcccggtgactcaatctatcgatctatgatagttaagcccttggacgtcatcacttacgatttatatcataaaaacatgtacctgcaactttgcttctaattttaatgagttccgattcagactacgaaacaaatgtcctataaaaatttgccaacttctacatttcgatctcaactttcaacttagccgacatcgcctgattcgatcgcgaaccctacaattagagagtacagggatataaatcagccttagaacgatatatagtagctacctacccaggccgtgatatctcgtggcatcacgccgtgaatcaccgaagttcgaattcttctttgcctggctatttacacatgaatacctgccatcactcttcctcatcctcgtcatcgtcctcagcctccgagacttcctctccgagttccttgagccgttcctaagataataattagtcagatccccagaagcttgagaaaatatctggccagtaaacataccttgtcctccattcgcttagcctcaaggtccccaaagacaatcagcaggtcttccagttcagactgggctgactggcgagcctcctccttttctttggcttcaattttagccttgtcgagctgggcctgcatgcttttgagggcttcggccgcactacgagcttgagactcggcctccctagccttttcctcggcctctttagcccgtgcttccagcgcagaggtctgagatacggtgccttcttgggctgtttcaagatcgttgctagacttctgagccttggcaaggtctgactttagaactgcgacagactgctttagggttgcaatctcagcctcatgctcttttttggctgcggcgagatttgactcgagagtcccgactgtattattgtggccggtggattcagcctcatatttctgcttgattgtagagagattggactccaagatttcaactttgctcttgtattcaccgacttccgcttcgtgattttgcttggctgcggccaacgtagattccaggctctgcaattttttggtaagatcggtgacttctccatcgtgggttcccttgatgctttcaaagtctttgatttgcttgttgaggtctgccaccagtccatcattgcttttcttggtattttctagctcctgaatcttcttttcaagatcggcgacctgtcccccgtgggccaccttggactggctgatcgtgttctgcaactcctggatctttttgctgaggttatcaacttgaccgttgtgggatttcttggtgctttccagatcttcaatcttcttttgaagatcagtgacctgtataccgtgggcctgattggactggctgatgacagtttccaactcctggagtctcttattgagattgacaacttctcctgtatgttgttccttcatgtgagaaagctccgactctaagccacggatagtttgctgcaaaccaacaacctctcgctcatgatgctctctcacttcctttgctttgctgctcttgttttcagattccaccgaagtttgtttgagctgatggtcgatggcacggagttgatcattgtgctgcttaagtaactcattcttgtggtggttatgttctttttggagcttcgatagctgttgggatagctcctgcgcatggcgttgctgcagagataggttggtttgttgaatctttgacagctcaatcgcgttagattcctttgtctttcggtggtccaactgttcttgatcaagcctccgctgaatgctaacgagatcagactccaatgtttgaagggtctgggtgcgatcttcaatttctgcacgcaatgaatcaacaagctcacgtgaaattcccttttcgacgccattggcaacaacagaaatctcaaacccgggttcacggtcaatggcacgaagcaatcggctgaagttatctttcaggaactcgatgaatgagcggtcaaagaacacctccggcagtccaccctcgagttgactaccagcggtttgaggaagaacctcaaagtcgcgaaccaatggacattcacgaagtcttgtgatcttatcaatatattgttccctgccaagctgttcaatgagtagtttatgtaacgtgatgcgagggatcggcgaatcttttgtggagaactcatagatgacacccaacaggaccgtgcaaaggccgggcaccaatttactgggggtgcgctgatgcttgatttcctgcaacaaggtttgaatgcagctaccctccccaagaagatcattcacgacgtctgggtcttcaaaaagccatccacagagcaacatcagataaccgactgtgattctttcgtcatcgccgcgctgcagaccagtaatcaggtttccaacgacggattgaacactagtgaccacttcttcgccgctctcagcgtcaccctcggtaacagccatagctattgccttcgcctctgcatcatcgaagatcaaatggaacatcagaacacaggccatccacacctgatatggatcggcatttcctcgcgcctccggagcagtgagaagtacagatagaatattaggaatccgatcctgcccgctggtatgcccttcaatggctcgcctgagcacatgcatgcgaattccaggatgatgggcgaaaaatgctttcatacattcgcaggcagcaagccgtgcgtctaaaaggttgttgggagcaggttcgaggctgagctttaaaaatgcttcaatgacattgatgcgtaaaggttcattcgcatcaccattgacagccttgtcgccgcgggggtaggagccccagaggacttcgatatcaccgaatctttcctgcaacggtgagttgccgcgaatcagatcggcacaagttgacaaggcctggacttattagacaaaggtacagacaagggtgggcaatagcaatctcaccttcgaagtcacgctaacactgaatctttgtccaaatgcaatgctaagaacttgctctgtcacgccattctgccaaaatgcagtctggttaatgggtgtactcatgccaccgcgaatcaaaaacaactggatgatggccaataggccccagacattcttatctcggtggaccagagtccactgtggcgccggctcattgtcttttggctcctgctgacattcatgaagcaaatgtgttactcttttcacacaaccggtctcgcggaaaaacgattggttggaaacattgaatctcaacaagtgagccaacaaggagaggcaatcttccactacctcggtcccatgagtcaatgctccctctgcttcaataagcgagaaaagtatttcgaatgcattctcgaatgccacaagcttttgcagctcttccgaggcgggggtcagggcaattaacaagacgagagcctctagcagaaaacattttgtcagctccaatcttccatgtcccacaaggacgcacaaataaaaacgacataccgttccgtactggctccctcgcatcagtcagcacattgactagtttggaaataccaagtggcgctgtaaaaatgcattcttgtgttcgttctggtcgtgcgctgcaaatgtgggacatcaattgaagcgaataaaggcgggagtagaattcacgggcttctaaaaggttgagtagggtagttatattatcttgtcgctttagaaacgttagtccatcatatcagggccgaggtcacgatgcgtacctgagtgaattcatctgccagccacagagctatttcgtccgacgcttcaggctaaatatatatatatataagcaacccgaatgaaactcatcagagtacaagatacccacactagattcatcaggcgtgaacagcattagaagggtctcgaggaccactttgatggtgtccacatcctcactgtcattgcgtagactgctgatcaatgaccgcaggccaccagaagcgactgatgcagggtagagttttgcaaagcttcttaatccctgaattgctgcccggcgatcttccaacaatgtagcactctgcagtctactgcttaatacgtcgattgtgtccgtagccgtttgtttggccggagcttgcgactcgaggattcggaacatggtagttgattcgcaatatcatgatcactgccggccgagggcgtaggaattggtaatcatctatgagagatctatgagagagcaaagtgagaaagtgaggaggttggttagttcgctagtcagtagaaagctgtcctattgtagtgcctaagcgccgcttttggctcaaacccgcagaattgccgaccgcccggaatttatcttttcgtcgaacggcaagctcaagaccacaagttcactgctctcaacctgcaccgcgatcatatctgcggttgcatctcttcttatctttgttacatgattcagaggagtctgtgtcttatctgaactggctcatattgtatctcattcactaacagagagatcgcgcctgcgcctgcacgaacgccgccaactaattgcgacacaacagtaccggaactctcctagtgtcgcattacaatcatgggtgtccccgcgttgttccgatggctgtccaacaaatatccgaagattgtctctccggttattgaggagcaggcccaagtggtcgatggagaagaaatcccgatcgacatcactcgtccgaaccccaatggcgaggagcaggataacctttatctggacatgaatggtattgttcatccatgtacccatcctgaggggaagcctcctccagcggacgagcaggagatgatgatggaaatctacaagtacaccgatcgggtagtcaacatggtgcgccccagaaagcttctcatgatcgctattggtatgtatatattctaatggagctttcaataccctccaaatcggagatgtccactaacctctatcctacgtacagacggtgtcgccccaagagcgaagatgaaccagcagcgtgcgcgtcgattccgctcggcgcaagaggctaaggagaatgaccagaagaaagaggaactccagaagatgctcgcccagcaacatgctacaaagaccggcgagcagttgatgcgggaggaggttgttcagaagacgtgggacagcaacgtgattacaccaggaacgccttttatggatatccttgctgcctcgttacggtattggattgcctacaagcttaacactgatccgggttgggaaaatgtatgtcttgatttattatcttggtaccaatgaacatactgacgttgacagctgaaaatcatcatttcagatgccacggtcccaggtgaaggagaacacaagatcatgaattttgtgcggtcgcagcgagcctcgcctaatcatgatcccaatactcgtcatgtcatctacggtctagtaagtttgtgatgatcttctaaatcaatcttctcagatcactaacttcaaacaggatgctgatctgattatgctcggtcttggtactcacgagccctacttccgagtactgcgtgaagatgtgtttgcccaagactcaaggcctcggggatgcaggctttgtggacagaacggccataaggctgaggagtgtctaggccgcccaaaggagaagagtggagaattcgacgagaagcagaacgctgcccctctgaagccattcatttggcttcatgtcgccgtgctaagagaatatcttgccgtggagcttcgtgttcctcagcaaccgttcccatttgacctggaacgtgcactggatgactgggtcttcatgtgtttcttcgttggaaatgattttcttcctcatctgccttctttggatattcgtgaaaacggaattgatacattgattgcgatctggcgtgacaatatccccgccatgggaagctaccttaccaaagatggaactgttgagttgaaaaacgctcaaattatcttgcaaggactagcaaaacaagaagatgccatcttcgcccgtcgtaggcaagcggatgaaagaaaacaggcgaacgagaagagacgcaaggagcaagacgcagctcgaaatgaagagcgtgctcaaaagcgaaggcggagttccccccagcatgacttgacagctggggatcgctctcacggtggtggcgagcccgcccctcccatggaacttatcacacccggccgaggccacttgaacaaggagactagagagctgacacacagcatggtcatcaaccgcggagctgtgtaccgtgctaacatggagaataagagcgccgctgccgtgttaaagagcaaactcatgaagggcaaccaggatgtagctggagacagcgaaactccagctacaaatggcgaggatgtaccaggtgaaaccccagggcagacttctcccggggttctcgggaaacgaaaggtggatgcaactgaacaggagcttaccgaggcaggaacacccggcagagactctcctctgcccgttcctgttgctcccgagaagcccaaacaagatgagccccaagaagacactgtcaagctgtgggagccaggatacgccgatcgatactatgagcaaaagttcggcgtggacccgaaagatttagaattccgccaccaggtcgctcgtgaatatgcgattggcctttgttgggttttgcaatactatttccaggggtgcccctcttgggtatgttgtcaacccccacttaattatacgattgagcttcgctaacttgattgcagacctggtattatccaaggcactatgcgccatttggtgggttttttctttggtggcttccctcagatttcccagaaatcagctaacacatattttacagctgctgatttcgttgatattggcgatatggacgtcaagtttgagaagggcacgatattcaaaccttttgaacaactcatgggtgttttgcctgcctcatctaaccacgcgctgccgaaagttttccatcctctcatggaaaatcctgatagcgagattatcgatttctacccggaggacttcccattggacttgaacggcaagaaatttgcctggcagggcgtgattcttctccctttcattgacgaaactcgccttctaaatgccatggcgaaggtatatccgctcctcactgaggatgaaaagagccgcaactctcatggtcaggatgttcttctgctatccgaccgaaaccctttgtaccaagaccttgtcgcgaacttctactctaagaagcctggcccggcacaatactccattaaagaggatgtgagtggcggcctggccggtattgtcgagcgcagcgacacctacatcccccacagctcgttagtttcgccattggaggcacatggaatgccaggagtcgatgatgatcgttctctcacgtgagtttaaccctcccatctctgcagtttgcttctttgactaactgatcaaagggttctgtatacgatcccggagtcttctcatatccacaagtccatgcttctccgcggggtaaagctaccgacgccaatgctggattcaaatgatatcagagccacccaaacacgatcccaaaactcgggccgatcattcggtggcgcacctttccagggcagaggacgcggcggccggatgaactactcaagtgaccgcccgaacccattcgctgcacatcttgacccgaagttcaactctgggccttcccaaggtggtcccggtggtgctcccatggtacctcctggatgggttccccctggccaagggtacggaggctacgccagaggaccgcctccccctccacgcggcggaatgccacaccagtaccctcctcagcaccctcctcaacacggttatcaacagcctggggactattatgcccagcaaaacaaccagtacaaccagggcggtcagtacaataacagtcatcaatcaggctatggccagcaggattatcgtggaggcagaggcggtaaccgtggagggcgcggccgtggtgggcagaaccgagatcactactccaacaaccaaggcggaggagggtataatcggtactaaaagtaaatgagggtccggctttctgactgtttcttgcttcttccgatactcctagttattgatcttttgatacgtttgggaattgggcatgtctagggaaccattggagttagagaaatgtaaaatgaattcaattgatgttccaacagacccttcttttgtccttctgcatgcaagagtcgcgccctgatgccccaagagtatatacaaaggctgctcgaatccccatgctacactatacctagacagtaaaaaaaagccattttctcaccacatggtccaaagtctactacttgttctatgttcatctaattggctgttttgtaattattctcactctttatttgggagtcctcctatcttctgcccgcaaccctaatacgatgcttgtctagttgtagaaggcggtgtaaatggaggggccaaggcacactggcagaaaaactaggcggggtgactcacccgtagacttgcaagcccttagagatccttagtcgcagtcaatcttctcttttaaaccactggattcaccacatcatggattttcctgcggaagaagaaatcgtgctcgctcgttggagggagatcgatgccttcaaacgccaagttgagctttcggctggaaagccacgctatggattcctagacggccctccgttcgctacgggaacccctcattatgggcatttgcttgcttcggtaagacgacagcgaacaatttgcgaatgatttgtgttttaatactttccactagacaatcaaggatgtgatcccccgttattggtctatgaagggatatcacgtggagcgtcgttttggctgggatacgcatggtgttcccattgagtaagttcaattcaattctagacaagacttgctcaagactgtgtagcccaggctggctgacacaaaacctagatatgagatcgacaaaaagttgggcatgtctggtctgcaagcggtccaagaaatcggaatcgagaaatataacgaggagtgtcgatcgattgttatgagatacgcgacagaatggcgccagaccatcgagcgattgggtcgctggattgacttcgataatgactacaaggtacgctcgagtacgtctgacattccctgcccttatgttaacactttttttcttgtcatttagaccatgaacccgtcattcatggaatccgtctggtgggttttcaaggagctcttcgacaagggcctcgtctaccgtggataccgtgttatgccttactccaccgccctcaacacgccgctcagcaacttcgaagcgcagcagaattataaggatgtgcaggatcctgccgttgttgtgacattccctctgctggatgacccagagacatgcctacttgcatggaccactaccccatggacgcttccatcgcataccggtctgtgtgccaacgccaatttcgagtatgtaaagatctacgatgaggctacgaagaagaactacatccttctggagactcttcttgggactatctacaaggacccgaagaaggccaagttcaagatcatcgaccgcatcaagggttcagacatgctcggatggaagtatcaacccctctttgattacttctatgaagaattcaaggaccatggcttccgagtgctgaatgacgactatgtcactgctgaggatggtgtgggtattgttcaccaggcccctgcctttggtgaggaggattaccaagttgccatgaaccacggcgtaatttccgagtctcgtcatcctcccaaccccgttgatccgcagggctgtttcacagctgaagtccgggactttgtgggccagcacgtcaaggctgctgacaagggcatcatcaagttactcaaggccaatggtcgtattcttgttgacagccagattactcacagttatcctttctgctggcggtccgatacccctctaatctaccgcgctgtgccatcctggtttgtgaaggttaagcctatcattcccgacatccttgatggcattgaaaaatcccactgggtcccctccaatgtcaaggagaagagatttgccagctggattcggaacgctcatgattggaacatttctcggaaccgtttctggggaacgccgttgccattgtgggttagtgaagatttctcagaagttgttgctattggtagtatcgagcaacttaaggaattgagtggctataagggcgagctcaccgatattcatcgagataaggtcgatcacatcacgattccttcatcgaaaggaaatggcgttttgagacgtgttccagaggtctttgattgctggtttgaatcaggaagtatgcccttcgcaagtgtccactacccctttgagggtgcagatgagttcgaggaccgtttcccagcagacttcattgccgaaggcctcgagtaagttgcccatgttttcccttctctgtccgttttcacgtgctaatattatatttttagtcaaacacgagggtggttctatgtactcagcgtgatcggagttcacttgcgtcaaagactaccatacaagaatgtagtggtgaatggcattgtactcgcagagaacggtctcaaaatgtccaaaaggtgcgtaaacacaatcttgacatgaccacgacccgaactctatctaatatgccgatctcacaggttgaaaaattaccccgacccgtcgctgatcatgaatttatacgggtgagttccgcagttcttcagtcccgagttgttcagcttttcatgttcttcgggattgtcctcataagaagtttcattaacattttttaaacagatcggacgctcttcgattgtacatgatcaacagccctgtcgttcgtgctgagcctcttagattcaaagaatctggcgtcaaggaaatcgtcagcaaagtgcttcttccattgtggaacagctacaagttcttcgagggtcaggtgaccctcctgaagaagacttcggacattgactttgtctttgatcctgcagcagagagcactaacacaaacgtcatggaccgttgggtccttgcaagctgtcaatcactacttctgttcattaatcaggagatggccgcttaccgtctgtataccgttgtaccacgactcctagagttgattgataacacgactaactggtacattcgcttcaaccgcaagagacttaagggtgaaaatggcgttgatgacacattgcacgccctgaacactctctttgaggttctttacactcttgtcaggggcctcgctcccttcactcccttcatcaccgacaacatctaccagcgccttcttccccacatccctgagtcgctccgtgccgaagacagccgctgtgtacacttccttcctttccccgaagtgcgtcaagagctctttgatgaggttgttgaacgcagagtttctcggatgcagactattattgaacttggtcgtgtctcgcgtgagcgtcgggctatcggtctcaagacccctttgaagtcacttgtcgtgattcataatgacccgcaatatctcgaagatgtcaagtccctcgagccttacattctcgaagagctcaacgttttggagcttgttctctcctctgacgaagccaaatacggtgtcgaatattcggtgtccgctgactggcctgtgcttgggaagaagctgaagaaggccgttcaaacagtcaagaaagctttaccttctcttactagtgatgacgtgaagggatacctcgagaataagaagatcttggttgatggcattgaactcgttgagggtgacctcgttgtgaagcgaggaatcaaggagactgacaattccaagggtatggaaaccaatacggatgctaacgtgttgaccattctcgatgtgaacttgtacccagagctggctcatcagggtctgggtcgtgagatcatcaaccgggttcaacgccttcgcaagaaggctggtcttgttcccaccgacgatgtgaaaatggaatacaccataatctcagacccggacaatatcggccttgatgaggctttcgaatctcaggctcacgtgttcgagaaggtcctgcgccgtcccgttgaccgcagtacatttggtggcgacgagcttcctactggagaggaagagggcactatctcacaggaagaacaagaggtgcagaatgctactttcttgttgcgccttcttaagctttagcatgccaaccaaaagaaaatgtgtagagataatatctactttttaactattttttgttgctttgaatgaaatcatatgcaccttcaataccaatcaatacctggcgaaatccaacctataataatttacaaatgcttttgcttgcgccgccgtaccaaaacagcctcaaatatttgagtgattccgatgcttccaacatataatccaagggaacctttctttagccctttctagatgccgcctgttgaatggttagcttgtcgaacagcgaagcactcgctcgtcacctaccaggtagcaatccttcagtcgcagaaactccttggcgcacatatctttatgtaccgagttgtaatcagtaacaacacacttgccgtacgccgcaatctatcaagctagttagatcggcaatgagatgaggtgagacagaaactacacacctctacagagcattgggctgaagccttggcaatcttctcgactgggcgagttcttcccggcatcttgcaatacgaggtgatgatgcagcaaatgcaaagtagcttaacattccaatgtgaaagcagtaagtaggacctccagagcttgggaatccaagattgttacataagaccacgtgaccgtcctgcatgtttctgtcgcgacaaccaaaacaacccgctcaaccgaccgttatctcgattgatggcgcatgggttgagtctattgttcccattcttttggaattgctgattgcagagtgtctctgttcgcgcatgtctttgattctccgcgctccccgctttcgcgatgatttatttggtcctgcagctctatgacccaaatgcgacaaccgcgccttaagatcgcgatttttcgatgcctccgatatcctctcagcgtcaagccgtgacagaagagatctcatctctttccgacgacggtagggcgcaatcaatcactcgttaatttaaacggagcctgacctctatagatgtcggctttctctaccaggttatcgctgctgccgagacaaaacccgaagcggatcgactcccattccgggcgcttttcgaagcatatgacgaagtcgttggcgaacatggcgtcaacgcagatccaggccatgcatgcctgcgcttcctgttcaagatgggaagcaaagatgtacgcggcgagactctcttcgacaaattcgagaatgcgctccaacagatgggaatcgtgattgaaatcggcgaggacggctctaccaacctgaatgagacatatgactacgatcaatatacagtggatgttacccacagccagaccgttgaccgtgaccattctccaattaccaatggagtgccaccgacacccaaacggcgcgcatcgtttaacaccacctacgacattggcgaggatcccacacagagaagtctcatcaatcgccctagctctcgatcgtcaatgtcgcggcttgaaattggcaagccccagttttctaaaccaaaactgtcacctacctccaggcataattctgaacctagcaagtcgccagatcggacacaattaatccgccagtttttggatgttggtcggcggttgcttagcagatttgacggaacagaaaacaagcacggagtcacggaagaaaccttcttgactaatggagtgattgcgaggtcggccgttgctcgtgatcgttcaaagagaatgaccgaggccccacgtccccgtcgttcaccctcgtacgattcttcgggcagttccgaatccaaagaggtgcaatcgatcatgtcgcagagcccagaacacgattcttttgacaaagaagaggtgccaccggagttcatttaccgcccgcaactttccgatctacttcgagatgcatcgaccttcaacatgtaccgacagcgatcgatctgccgtcgaattttgacacaatggctgaaaaaagcttttcaagctcgacagactcgccaaaccagggaaacactcgctgtcaattacgatcgaggccttcttctccgacaagcctttgatccatggcgagcagtaatccaagacaaacgccactcggctcggacagatcggttcttcaagcaccttgaagcgcgtgccagtcgcgcacgggacttatatctaatgaccaaggcgttcagccactgggctcaacttacgtcagaagaggtagctcggacttctgctgcccggagacatgtacttggcgtcaaatatttcaatgcctggcgcgaaatcactgccgtcaacgagttgaaggctcagcgttttgcgctacggaggccttttaatgcgtggcggaaaaagatccaagatttgaaagcagcaaaaactcaagctatcattgtacgcaacacaaagattcaaaaagcatcgttctgggactggtggtggtgcttctgcgaccggcgtgttcttgaggtttctgattatcgacttaagagacgatcacttctttcctggcttcggaatttgcgaactaatcgagagctcgatcatgaaatagatctacataacagacagtcatctttgaagtcgatattccagatttggtctcatcgctcgaaaagcattgcacttgcagatcaggaagtccaagcttctcggcgccaacatgacctcagagaaacctttgatgaatggaggattcagtctcggctggccccggctgcttctcgggtctctgggatggtgaacactcggattctacgaaatgccctttcacaatggattggcaaagccgaaatgttcagacaggcagaggaggtagatcgccgccgaatacaacacaactcgtgggtttcctggaatgacacgcttcgctgcttggcgcttcgtgctcgaattgacgagcgcgtcaaaagtgaggcgatgtacaaatgggtcttgatggaaagattcgagctgatgcgaaggatacgcgaacaacgcatcaagcgggaagtattctcccgatttgtgacaaacactcgggatacttacactcgtttactgtctcatgctgaagcttatgagactcatcagaccgaaaatttggttcgatctaaatttgccatttggcgtgatcaaatgcaacttcagcgtgagcgggagtatgtagcatctgagttttatgctccacggcttgcagctgagtctcttgcaatctggcgatccaaacataatcaagtggtgaagatggaaggttgggctcaagatgctcgattctatttcttgatgaagaagtccatgaagcaatggcatcaggctaaagtggactccggcaaaaaacggcggcaagaatcctatgctaaagtccggcggcgtattaaggtcaacctcgcgtctagagcgttggctgtctggtcatcaaaaactcgagtcatcatggagatggagcaaaaagctggtgatattgatcgcgaaaaattgcttgctgatgcgtccgcgatattcgtccaatggcacgacaaaacaaccatgaggcttcaggattgccagaatgccgaccgttcctatttccaccaactcgcgtttgagcagatgatgcgaatgtccgaagcattcatcattcggcgtgagatggaagaccaagcagagaatgtacaccgattgcatgtcctacgactggcagcagcttctcttcgcaagctcagccttcgtatcttccagattggcagttcggccgagacagccgaagccatgcgcgaaagaaatctgaggaagcactcgagaaacatgttccgcgattggctagacaaggctcaaatgaagctggaagctcgagattctgccggtccatccttcacgcccgcacgaatgtcaacctttggaaatggcgatggcgccggatcagcaattttcgacccctggtatcaagaccaagcagaaacacctttcaaaataagtgacttcacggcaacatctcagacaaccttccatgacccgatctctgcaagccccttggcaaccccaaattacacctctccctctaaacgagccgcccgggcgctagccctcgcccaaatgtccactacccccgccacacccttacgcacacctttcgcaagtcgactacttcgagctgggactacgactgcactatccacttcttccaaacggccgcggactggtcggcaaagctcggtgggaaatagcgtccggtttgtggatgaagaacctcccgagtctccaacagatggtcgcagatcagcgactcgacgatcttaacgatcttgttcggtatatgacctttctgcggtcacttcagcctcatgtacatcagcgattgttataattttttttttctctcataccctgtcgatacgtgcgatcatgtttcattcaatgcatcatccggcgcagcatatagcgggttcaagggtttctgggtctttggtatacagttttgcacttttgccatgattgaatgtgatactcaatttatgaaatgggttttccaaagaactttcgttcaatgagatataaagtatagcatctagtcggtcccgaggtcagataatagtaaatgcttatcggagagctctgtatgatgtgctcaaagctcttgaatacaatttctcgccgtaacaaatagcaattgctgaatccataatatcagtgatatttatagccatacatagctgtgttgttccagtcgacggtcatcggtcacaccgagtggagcgggagcgtaatcgactcaggtggtatgtctcttcgcctcgtcttgccccctgcgtgtatccagacaactccgccaaacacccataatctaccctccatttcacttgcgactctactcccaggcataataatctttgacctggcaatgttgtaacgtgttttcgagcgcaacgagcgtcaagtcccgaaccaaccatctctatgcgagcggtacttccggggagacccccagcgaagctgcaggcgttcagcacggcgctgtgggatggtcttcgtgttgttgtaagtactctcagatattgccagattcccgctccagctctgcggttcgtttaaagctccctgttgctgactcttacccccgcgcgttccccaataggcatacatctccggccacgcgctggttatcctcggcggtccgcaaacgctcctccaaacgatttacgtcgacgatacagaaatcctcgaggccgtagcttttgacgaaacatctggcaagattgctgtttgtggcggccctgatgtgttcgtgtaccagccatacggcatccagggcgaaacgctcaaggtgcgcccactactcggagcttggtcgaccagcaacacagctttataatgacaatcacaactgattttaacatatgcctttatttagtggtcgctcctttatacattccgcgcccccgatgacgacgaaccgatctatacactatcgtggggttcctcgaacgagctcctagtgggcaactcccgcctcgccctttggtttatgaatgacgaaccgcgccttgtatggaaaagggagcttgcaacacccgtgaaattcgcgcaattttctccggattcgtccttgattgttacagtagggcattatgaccgtttggtcaaggtatggagacgactcgccttcggcgcagacgaggttcggttcgaaaactcatacctgccccatccgaatgtcgtcaccgggatacactggcgattacctcggtaccctgagcaatctatggataatgttctgtatacattatgcgccgataacaagattcgggtatgggcagtgacggacgttcatgcgctttctgccctacagttctgggcagagattgacatggatgattcggtccaaccgaggcatgcgtcggatgaggatcaaggaccacaacggcggtatgggtttattttagatggccgcgacttctgcgctgcgacggagcgtgctgttcagaggaccacaggaaacaaggaaaatcatgcgctagaacatatcatcgaggttgcgagcaaggccccggagatctgtattgtcactgatggccggggccatatgtctgcttgggcttttgaggatatcggttctaaagcaaagaccaagttgagcgtcttcaatattctccatgtcgaaggcttggacttgggatttgtattcgatcaatcgccgcaagacgactacgctcagatttgtgcattccagagtacgccatcggacgacaagctcagtgttctggtccatcacttcgacggtcggatcgagtggtatgattctcgtgtggatgttctgtttgatcctgcaccccgcacgaaaagaatcacccagatggcctcttggtctggccatactgcccctgtgaaaaagattgttcggaatgcgattggagatacgctagtgtcacgtaccaatgaaaacaaagccactgtatggacacagcggcgtcgggaaggaagatcaatcttagcgtacaagagtgtcctcctctcggatgagcatattcatcggacatgtgtgctagagaacatgaatcttctcgtcaatctccaccacaatggggtctccctgtgggatttcagctcaaatcatgccaagaaattgacttctttgccattctcactgcccggcaagccactatgtgtgctgcaaatccccagcatccaagcgactccagatgtttcctatgtagcaacaatatgggcagacatgcacggaattgcgtgggaaatacgaggcccgagtcagggatcccacaaggggagctttataaatgagcttggctatcaagtgcgagaattctgcacctttgacatggggctggaggaggatgttgcatatatccttcccgtcgacccagcaggccccaaaacaaaaatatcgggcttcttcgattctttttctaccgacatcgctctctcctacacctacagtggagttgtgcgcacatggacagccacgatcgatccagtgaatgtgaaggtcgattggctacttcaatcaaccgttgatacaggcatcaccaacccatctatggctagtgggagctctattcgcaaggcagctctggttgacgaggaccggactcacctcacaatctgggacaccaacaatgctcagctggaatttgagcaacattttgctcctcatgacattatccaggatttggactggacgtcaacaccagacaaacagtccatcttagccgtgggattcccacataaagttgttctcttatctcagctacgctatgattatctagattcccgaccctcgtggacacaagttcgggagatctggatccgagatctcacacctcaccctataggagactcttgctggctgaataacggccatttagtcattggggctggcaatcaactgttcgtttatgacaaggatattgacgttggagaccgcctagtgtctgagcttcggatgccatctcgcggactatcatctgtcgatctcttcgacgttgtcagccggctgaatggcccgttgcctgtgtttcatccacagtacttggcacagtgcattttggctggaaagactagcttggtacattcgattctcttaaacctacatcgcaagctgaagttctatacggagggcgatgagctagatggtttcctagatatgccggtagaatgtttctacgagcaagatgtaagtgcgcgctttctcatatctctccctaatactaaggaaaatcagggttcccaacaaggggtctccaaggaaatgcgctcttcctacgtcgattccactgatgaggaattgccgtctgtcttagatgaaaacgctgcggccgcgctcaatgagagcttagcacgaatcgccttgccgcaactgtctagccacgaacagttccgcttggcagataccattgaatgcgttgccatggttgagaagcaccggcgctcaatggacgataatgcagctcggtatctcttattcttccgacaacatatgctgcggcggacccagggagttgccaataaagacgctgtctcatggcgagagattgtctgggcttaccatagcagcagccaagatattctcacagatcttgtctcccggcaattcaatggaaaattgacttggaaggctgcccgtgaaagcggtctcttcatgtggttatcggattccatagctgtggtgcgtgtctgtcacgtcatttcattggtcacgaactaaccaattggttagaaagcgcaactcgaaatcctcgcccgatgtgaatacaccaagacggaagagaaaaaccccatcgattgtactttatattacctagccctcggaaagaagaacgtccttcagggtctctggcgtattgcacattggaaccgcgaacaagcagcaactcaacgtttgttggcaaatgactttagggaaccgcgatggaggacatctgcgcttaagaatgcttatgcattgcttggaaagcgacgatttggtaagtcgagcatcatactctacaactgatcacttccggctaacacccaacagaatatgcagcatcgttcttccttctcgccgatcatctgcgtgacgctgcaaacgttatcataaaccagatgggtgatctccagcttgcgatcgcaatcactcgagcctccgaaggagacaatggaccggttcttcgggagatattagaagaaaaggtattgcctcaggccgcttccgagggcaaccgctggcaggcctcctgggctttctggatgcttggacgacgggatatggcagtgcgggcactgattgtgagtacttttcttctctagtcgccaaaccccaattaatcaaatctagtcgccggtcgagaccctcctattatcgacgaccccagccaccccgggaagcccggagcgagtaacccttcagtccaagtcatatctgtccaacgatcctgccttggtagtcttatatcaacaactccgcgaaaagacactccaaaccctcaaaggcgcctccaaagtgcgacccagggaagaatgggaattcgttattcgcaatgcccgactctacgaccgtatgggctgtgacttcctagctctcgatctggtacgccactgggagttcctaggcggactgcctagtcaggatgtactgaagcctaatacctccttggaaatgaacgagaacggagtcgattaccggaaaatgcttcatcggcggagcagcctcgtagttgctgatatgccggtgcgccgagcagatgtctcacaggaacccacacccggcgagaaaccgaagaaagaagaacagaaagcgaagccgaagccacctcctacgatgtttcatgagccggatgccaattcgttgctagacagctttgggttctaggttagggacttaattatgttgacactgtaatattttctggatatacgtacgtccagttgctatcgagtgagaaactggggcttgagcacatatataccggataatgtctggcaatttttgatttccctttccgttttagtgctcaccccttgccgctttttgctcactgagtaaaactactccggcccgctcactgagcatcacctgagcagacccatcccttcactgagcactcacgagtcaccgggcactcaatgagcagcctgatccgctcccatatagcttagtccacgctcgtctcacgggtaacaagatatctgtggcggacgatggtactccgtgtcccattcaccacgcaagtaactataagtctaaaccatcacactcacaaacggaacgtttatccaccctacatcattcagagtacacccttcaatgggttttccttcatcgtcaattctgaacccgtcttcatacggactgtactcctcccaatccagccgaataatgtgcacaacagccatactctcccttctatcggctaggaattactctagcatctcttgggttatctgaatgcagtacctacatcgttgcgactcttggattctgattcggtttggatcaagctcagacccttgttcctcctgttcggcagttgacgcccaccgcttaaagtgatcccgaatcaccgctgtgcttgcgctatcaaatttctatgggtcgtcaaacacggtcaaggccagattatcaagtaaatcagggcccgccatatcttccagtgactccgtagtatcgacgagcagacggcgcataaattctttccagtctgcgtcgctctggtatgtagagcggtagatagcaaaaccccatgcgcgatgaccatctttacgaagccaacgctctattttgtcagcaatgttgctatgtgagctgatgtatgggtggcgtggagattgttcctgcacttgggggaattgagcttgtgggcgcgtgtgtttttgcataggattcgccggtgaaattgacatcgatgagcagtatctttgtagggggaggttcagatgccaacttctttgcccaggatagagcgtgcgcgatgtaactggtgagataaaagcaatactcgtttttttcgatatatgaaggctgaaggtgtccaagcagttaaacaatagcatagtcacaatggttcacgtgattcgcgcccatgtaggcaatacaacttacttcacttccttcattctaacaattgttgaccaaggatcaaacctagcgagagagtcaccgtgctttcatctcaaattaactgtcttgggttattcttaatactacgtcttatcacagaagagtaccaatcggcctgacacgtcatgtttacatattgagattcgacctctccaagaccccggacatccgtacgtatattgtactgagtacaacatctgtgtgatgatctaccctcacacaatggtcaatacctagtcattgcaaggagactgctacacagtagcggtcaagatggagaatccagtttgaagatgcagagtggaaaatttcgcagatcccagctgacaattgtgttgatccccattgctctcactggctgcactacagcccgtagcgcgcttcacctactccagcagccccagatggctgcagatgggttccagttatcctgatggatttgcctatcccagtgcgatcggcggcgccaatctgcgctattacatcgccaatcgcgccgatccttcagctcccacaccttttgcgaacgatggagacttaggccgagcgtgagaaccctcttgcgccaatggcctagctgccgatcgggagacaatgcatacgttcatgcagactaaaatcgagagatgatgctcttaagacttcccccggcccgctggggtttgaagcttttcagctctctctgacttcagaccctttttttgtattctagcgatatatccctggtcgatttttgttctttttttcagcgacaatgcctaccaatatcccaggaccgcccggagttcccctcttgggtaatgttttcgacgtcaaccccaacgagacgtggaactcgctcaacaagttggctaagcaattcggtatgccagcaacccagccctaacgagtgatcactaattttttaggctccatttttaaaatcaatgccctcggacatgagatcgttttcatcggcagtgtcgctctgttggaagagatttgcgaccagacccgattccgcaagtgtgttacaggaccagtggtcgaaatccgatatgccgtgcacgacagtctgttcacagcatacgactacgagaagagctggggtatcgcccaccggattatgatgcctcatcttacgcaatctgcgaccgacaacctcttcggtgacatggcggaggtcatcccggacctgaccaagaagtggagtgcaggaaccaagacacgcactctgctcaccaaagacttggaccgcctccttcttgcatcctgcatgcaatgtttcttcaaccagcgggtacacgtgctcgaaggcgccgagccacccatgctcagcgcgatggacggcgccacactggaggcaatgaagcgacccacccgccccaagttactgaattggcttgtataccagcgccgattcgagaaagacacgaggacgatgcgcgatttcgctgcgcaggtaatcaaaacccggaaagagcagccagagactgcccgcaaggacatcctggatgcgatgatgaacggcgccgacccggagagcggcgagaagctctccgagtcgcaaattatcgatgagattatctcgatctttatcggtgccgctacagcacccaacctcgtatcctacgccctgtactacctgatggagaacccgagcgagatcaccaaagcgcaggaggagatcgaccgcgtggtcggcgacggcaatatcgacctagagcatctgcagagccttaattacgttgaagccatcctacgcgagtcgatccgtctttctgccaccgcgccgggcttcaacatcgagcccattccttctgatgataagagccctgtccttcttgccggtggcgagtaccaaattgcccacaaccagcccatgatcgcggtcttgagtcaggtcaaccgcgacccggctgtcttcgaggaccccgaggccttcaagcctgagcgtgttctcggcgagaagtgggatcagctccctgctgccgcgaagaagggcttcggtaacggcaagcgtgagtgcattggcaagctctgggcttggcggtggtcgttctttactctcgccagcattcttaaggagaatacgtttgagctggcgaatcccaagtataagcttgagtcgaacggtgcattcagtatcaagccgcttgagttatatggtcttgttagcccacggaagtaatcttgaaattgtttttttgttgggattgggtaatgaatttgtcgatatagttacatcaacgttatgatgaatagatcttagaatggaacaagcttaactctatttttattcttatttctatctttatttgtgaaacatgggtagttcctggagatgggctcattacgtggcgactacgtagtaggcgattgcgtatatacgccacgcggacaccccaaagtaagacaagtaaagagaggaagttctacaatagaaagaagcattgaaagaatgttttgtatttttataaccaaaaaaaggaccagcctaaaagtctctatattgacatagaagcagaaaccattccagctgggtgtagaccatcctccgagatagaatgatcaagagtctatcttcaaaatcatatcaaatcaaatctcaaagaaaacaaaatttatccgctgtaatcaatggtaacagccagacgaacaggaccagaggccaagttggcaccaataccaccgacatcggtctcagcagaggtgtaagcgttattgacagtagcagcgtcctgggtaaccgaagagcaaaccgagccaagggcatcacagatctgcataccagagatagacagaccagcattctgggcagcgataacggagacatcgaagccagaccagccactgttggtagtggaaccgaagtcgaactcgccccaggtagaagcgtagccaccggaggcatcagtagggatagtggatccggaggcggcgacccagccaccattcgagtcctcgtcgaaggcaatgtagacggtctcgccggcggcaagagtaaaggtgttacaggcgttgccgtaccagcctgtcatctggccatccgggccgtacttgttgaagatggcgacggtccagtcgtcggtgttggagcccgtgaactgcgccacgtacttgtagttgctggcggacgcggcgtcaacggtgatgatgttgctgccgtaggggttgcccacgttgccttcgtaggttgcgcctgagccggaggagctggtggagctgccgaagccggcggtggagtacgagccgctggagggcgtggaggtccagctgctgccgctggcggctgaggaggatgtggcctggcggcgctcaagggtggtgggtagggccagggtgctggtggtgagggctgcgagcagcaggagagacttggcgaattgcatcttggtgggtttgtgtgttgggagtgtgttgagtcacaaatgaaggtagataacccagtgaagatatgaaagagtgttgtgtgtagtggttggattcgaaagaccgtgttgtaaaggaatgaacggtagtaccaaaaggagtgtggttgcttgaaggaaagagaacagacacgagggtcaacggcaagggcaagtatatataccctcgaaatcgacagagtcttctccccacccgccacgctcgcctcgtaggtcgtaagtaaaagatgaaccgaaagttccgggtacctggctccatcgcagcgaaccactcgcggtgcgcacttgggcatacgtcaaaccgttgaaaggactcgtatacagagggttccacaaaggtcgaggccgtggatttgatatgcagttaccattggaggtgatctggggttggagtagatacataggtataatctgattgggcctatctgtgtacattctaagccaccaatgaatctagaattcgagatactccagggcattcttcattggctacccagtaaagagtgggcttggtcattgattatatccatgggcatctgatgtctagagccatgggtggacccggagcaagctctgaattaaaccagggaggggagacactttccagggtttcctaactaggtattctccgcatctcaattggtatacatccaggatgagggactacatgacaatattagtattgcagatacgagaagcgaatatgactgcagaatggagacaaggatgactcggcctagaaattcaaagtttgcaaatcgcattgtctgggtccaactccaaaagatgccctaatgtgggcccaacggggatcagatcgttttggtccggggctaaaggcaacggaactaccaggaactcagatccgggatgattagaactatggctgcgttatcaaggtgagctattgagacgcgtaataataatatggcattggcattggcatttaacattttgctggttcatgggagtatgtcggcctttgaagtcgattgatgggattttgtagaatttggctgatccgtggaaatgacgttgtggtccaggagacaaagtagcatgattggctgaatatatggacctccgaccaatcatagttgattgtattgtcttggcagggcatggcttgtatcgtggccaatcagaaccaacccctgttacaatccatggtttcccattctgttccttgaattctcttcatttgactttcttctggaaaagtcgcttggcccttctttatatgcaagccaccatcttccttctaccggctaagatttccctaggtggatcgtgtgattctttctgtgttccacttgctccacggccaagtcctaacccatgcgaattcggagtaataaagaactcggtgtttgaagagcaaaccttggaacagaccgcggggttcacgttgcaatctctcaaatgtggaaacaagccatggcatgttgggtccggcaatcgtttcggatatttgaacgaagattggtcttttttcggcttgaaacggtggaaaatgaaagtagacgatacacaccaccaagccctaatgcgatgatctctatgagacttggccaaaattgtgggtttctgtgacaaacgaaaagtctacacatgtaaatctggaagagtctagaaagaagttcagggtctttcatcttcaatgaaaactttgatttctgaggccacttttttttactttcaaaagggcagtatctattgcaattcgctggtgagatttgtgcctcaataacccacaagctaggaggcgttctatccactagaaccgatgacagaataatagtcgcaccgagtcagtaacagtcaatttcggcgctattatgtctgtttcatcaggccattattatacgacaatatcacgtgtagacactgcccttctcgactcgtggccaagggattacttccagggatttcctaatggcaaagaccaatcaaccagtatcagggctccaggccgtcccactataatacaggacctggccaattaaagtggcggatgaaactgcagctatgttgtagagatgtgtgatttgtataaatcttgaaacacaaagtacaagtcacacaagagatgcgatgctgtcgatttgattagctataaatccaaatccaagtacaatttctcaagtcaaagttcgggacttcagaactggaaggttgcaaggtattggtaaaccacagagagatagatgagcaaggaagacaagatcattactctttggttatcacatagaaaattcgtctgtacgttgtacgcctttccccgccttcgttactagtatatatcgtagtgctaaatcccgcatgtttactccgtactactattcccgttgctgtacttctatagctaaatattatttctctaaccaaaagccgcaaaaaaaaaaccctaaagacataatgtcttttaatcacttccaagaaaaacaaccaaaaacatctgaaatgttcagcagaaaggcggtgctcggcgctgacgtcgatatgcagatcatcgggccaactccgagaattgacacacgccataactttagctggaagtccggggattctgtacggagtataatgtccctgaaaaaaaggcatgaggggtctataccccacttccccagccccctcgcataaatgcctaatctccccttctttcgaggattgttctacgtacctagcactatcacaaagatggcttcccagttttcctcgctagctacactgctactcctaggatccttcctagtgccagtcagcgcgagcaagattcctgctcaagcgcagttgattgaccaaaaagccttcaatgtcctggacacgacccaacccccaaccgaattcaatgcgaagagtgtacgcgattcctcaattgcggtttccagtagccccttttactgaccgatgcgtagctatttgtgcctccagggtcgacaggagacagtctagcccagcggcctttccatatatacgacaaggaatttctgaagatcatcggagaagctccaactctaacccggatcgcacattccccaaaggaccctctattccatgaagcagttgtatggtaggtatccaacacggaaataagtccaggccaagggaaaatagcatctgactttactttctaggtccaaggaaacggacgaggtgttttttgtccaaaatgcaggtgctaagaacgccagcaccggtcttaaaaagtcggctatcattgagaggatttcgcttgcggacgctgctgctgtctcccagaagtcggatgccgtgggccttgtggatgtaaccaccattccgtcatcgccaacgattctcaatccaaatggtagatgaccagctcttttttggtagttaaagataactaacggtgctcaggggctaccaattaccggggacagatcatattcgccggcgagggtcaaggtgactatgagccccctgctttgtgggttatgaacccgagaagtccattcaacgctacaggttagtacaaaccacctctttgtattcctggattaacaaagcggtctgtagttatccttaacaactacttcggccgccaatttaactctctgaatgatgtcgccatccacccgaaaaacaaagatatctacttcacagacacaatctatggctatgtgcaggacttccgccctgcgcccggtctgcaggatcaagtgtaccggttcaatcccgagacaggtgctgtgaccgttgtcgcggatggatttgaccatcccaacggtaggagatcaagaatttgtacaagctcaaaaaggaaagcgcaactaacaatgtaacaggctttactttctctccagatggcaagtacgcatacgtcaccgatactggaattgatagcggctttttcggtctcaatttcacccgccctgcttctatgtatgtgctagttttcgcgatccactgattggatttgaagctgattatagactgtgtgttacagctaccgattcgatgtgaaagacgacggcacactcggcaatcgcaagacttttgcttttgtccactctggtgcacccgatggtaagttgggcagtcaagcaagctgaatttatgatgttgaggctaattcttgaaaaaggcatccattgtgattcatggggtaacgtgtatgctggctgtggtgacggcgtccatgtctggaatccatctggcaagctcatcggcaagatctatctcggatctggtacggcgaatttcaacttcgctggaaaagggagaatggttatctgcgccgagacagacctttactatgccacgttagccgcggctgggaattatgtcgacagtgagatgtgagagccagaggagtggctgtagctttctatatttagtcaaaaataattttgggtgaacaggaatatcataaacggcagtcattcggtggttcatagaacgaagcgttcgctaagaactgaaatgttgctatgaatggatttaccagacttggacatactagtaccaattatacacttgaactgatttctccgtagatcgaagatactactattcaaagtccatgctcaatagacatcatgtcttgataatataacgatggcctcgtggggccattaaaaagaaggattccatctggctgtcatgccatcttttgtagaaaaaagttcgagcattgggcaaggctcggaagaaaagtgccgttgctagacggagctccattcaagctaggtgtatacccaaacaaactataacaattagctctattggtgactcgactcaagcattcgaaatgagtctccaaatgtgagttcgccaatgatgtccgtggccatgaacaaccaccatttgaacacgtcagtaacgccatgagctatgatatccattgtaattttttccacagctatacggacacgattggctatcagtggctcaaggcgagctagcgaagagtcagagatgggtgacgctaaaagacgccggcgatgggtatggaagtgtctgtcagtggttgaaaatacggtgggttcattgcctatggccagcttgcgatagaaagtagttttagagaattggctattcgtcttgtgggtctcctttactgcgtcagtgtcgcagatatcgatctgatctggaatgattcggacagtcgggcctacttcaatgtcaggtatttacttctcataccgataaatgctggcagcacatacaatactttccatgaagttgatggatgtacatcggtaccgtcccatttaaccaattgtatgtatagttggcatcggtgcatttcgatatttcgggcccgggtatatgagacagagaatttgtgagtctacgatagatggtgctctaaatttcgtatttcagtaagacagtaacattgcatccccgtacgaggagaatttgttataccgaccagaagagcagcaccaataatgcatattagccagtggctaatcagaaaagaagtagataatatcccgagtagctccattatatgctttggggaagttgcttctgatatggaatcaagcaactattactactttcgaaatggtgtgctcgtgccgaattccgatattgcacacaacttccagctgtattattgacgtccttggtgatttgttatttctactattgttggcttgggtgtctaataggttggatgctcattagatcagatcattactacatggtggaatcacacaatatagggtttaactggtcttcacggctggggatggtcttgacaacgcctgtctcgtagcagcattattgaagttgtttgggttgattcatagcctcataggattcccctcatatatgcaaagattgacgattttgatatgaactgcccgggtggtctagtggtatgattcgcgcttagggttaacccaaagcattaatgcgcgaggtccccggttcgatcccgggctcgggcccagtcatcttttttttctttttctggtcctttacagcatctggagatgccacagattgtccatgatttgaagggttaaaaggataccctttttttaacttgcggcacacttaaaactttcactaactgctttaggctattatagattgcggggttagcgccaagtactttctaaaagagaaagtcttgtgcactactccgtacttggagacgtactaatggcggaagtcgttctctatcaggggaaagagagcctttgctgaatgatccttaaagttcaaggttcaattatgctattctacagtcgctggatttttgctttcgtttctagtcggaaaaaattcattgccatatttactcacatacgatttccagagatctatcataacgataatagcgctttagtctgcgagaactagttctatctcgttggaagagggaacaaagatttgaggtctgccaccattatcatcatctgtaaagtccgacctcgtgctttgaccatatcccctgaaagtcacgatagtatcagcatgggttccatctttagtgccccaatcccaccacccaatcgttgcgcccttgaacgcaaatcggaagatcgcaccagttccgagatgatctgggaactcccagagctcatcatccaaggtgaatgacccttcccagctctcactcggatggagacatacaaagtcttcactttgagcaacgtgaatcttggaaggttgatcattcacaaaaccgggacaataatcaccatatctgcagggaatccactgttcgctgccaccctgaacccgtcgatctaattgataatttaattcatcacggaagacatcgatgaagaaagtaagggggccggcagtggtaaaattgatattgttgacaccgtgatatgtcattttgtatcgaaatttcatgcttatatcgccgttttgtcgcttcaattctgtggagccattctcggtttccagcgacacactaagtatgggcacgttgtgtctaatagaacccttgcttttgattgttgtcagcataaaattatatatattctagactgggaaagcaacgtactccgaaatttgggattgggatggcataatgatctgtggccgggaaaatgtaagtgttcagatcggagcacggaagatacgtccagagtcatgggacctcgtactcgtaaatggttagacgaatgccgtgatccttatctggcactatgtattattcttttcgcccattctgtagtcggatttctgagacaagcgtctaatcaccgactgcaaatattttcttgcccgttgacccttatgctttcatcactataggtcttgtgccacttggtgtctattcttgtttatcctactgatagcgtgaaaagtgtcgaacatgcatttttccaacagtgtcctttccttgcattctactcttgcccagtttatcacctcatctttttgctggccgcaatcatcgcccgggttttagattccgcttattatctcgcgagtgagactcacgttcctaggatcatatctggccctaggacccatagcatggttcttaggcacgctcttggtcgctccatggatcagacttgtagttcccagagattctacagctcccgggagtggagaatagagcttcggggaacaagtgggttcccaaagctacagtgggatcacccatcggataatatttaaatcaatagcataaccatacgttctacatctgttcctggccccctaagcacgaaccccggattacgagggccctccggaattaaaaaatgattcccagtggggcataaggaatctgtgataatgaacaataagctcaagctgcatgtgatacacgctgtctatatgagatggatgctggtgctagctgcggctgcgcgaagggtgtaccgtgtagcgaagtgtcgacgatgaagagctgaggacttctataacgtcgaagaagtagcagcgatgcaagagaccgggctcacgtaacctcctgaggtgctaagattacatgatagtgatactgatagagatgaatgctatggaggaaggtctgggctataagagagccaagtaattgcttgaacaggtagtcagctacctaggtctctctcctatgtatacacgacgtagggagtgtgacatatggttgttcttacttttcctcttcccttccaccctcttgcgctgtcttttctactttctttgttaagcctttttcttgccaatgcagcattttatccaagacataacaaaactcatggtctcgtcaattccccactttgaacccgtttgaacccgtttgaaaatgcagcactggcggtctctctccccctcgcccggagatggagcccggactgagccatttcttttatttggagatatccttactcccggatgatgaggcacttaccaatcggtactgcggagggctgcggcaagcgtggagtttggagacccgtgaaacaatacctagtcatttagcagtccagtatttcccgggtatggacggagtttgctaaacggggctgtcttttgagtgattacccacgagatgacagtgtcaccattggtgaggaaagttaccattttcgaattggcaagccgaaggaggaccgaagtcatgataatcggattgttgaacccggacctcaactctatcaacccatgatagagttaattcactacattcatcttcgtaatatgcctcaagcattagaatatcgcattcttaaagccttggaagcataatatactgccagtgatctagaaatatcgcgttattagcccgtacatccagagggcgtaaatttcgaaacgaccgtaccgttgtccgtgaattataacatgcttctaggattcctattttagctatttccttagctcgctcatgcatatccataatgttatatttaactatacgtatagaagttgaagaacaaaaaaagatgagtttttgtattgatttcggattttaggatatttgtgcgggatctatgtatacttattgttcttcaacctaaattagcgaaaaaaaacaagggtgtggttaatatgggcaagtacgttctatcggccgatctgcagaacttttgcggccctcacatattcttgccatctaatcaaaatgacatttcgcatgacgcttttagcatttccatattagattccttcaatttaaaaagaagaagaagaaaaaagaatgggcccgagcccgggatcgaaccggggacctcgcgcattaatgctttgggttaaccctaagcgcgaatcataccactagaccacccgggcagttcataccgagaattcccacatttgcctacaagagactcaatggaatttgctgacagcattctggaggcagacccaaaccacaaagtcaaacgctacccagcttacgatccaagccaagacaatcaaaagtattggcttccaagggttggccgtcccgtagagaagaatcttgttaagttggattgatcaatctagtgatgtcaatttacgagttagatactactagtggatctcttaacagcactgcatggggatctaggtatctgagataagttagcttaatcggagggcagatcttctcaaagagctaccatacactaggggcatacataaagcacacgatgaagctaaataccgttctgctagaaagatgcagagccgggctttcatgtagatataacgaaaggacgtatgtacaggtgttgaccagtccgagagcatgtatttacgcttgggtattggaatcggcctttatgattcatattaaaagctaggccaagttcaagaatacctacatatagtatgagccactcgcgctatacgacaaggaaacatacgtgagatagagcagcttcctcgtagaacgaaaggttatgcacgagaaggctgcttcaatatcctgcttttacaaaattagcagttatcctgtatgcgatgcactggtctaagatctaccacaggtcgggcccaaagaagtcgaagtcatatctctgagtccgatagagctcaggggagtatcgggcaccttgtaaattttgtaattagaatgccctcagggctggccaagaagcgtgactacagttcatcctgcatgtctttttgctcgagttgaactctttggcgggatcaaggtaatgcggtcgtccgtgtagaaagagccgggctgtgagataccccgacgaatggtcttggtcaatgaactcaaaatgtctccttcccactttccgtagtcacccaatttcccaagtgatgccttgatatctctccagatttgacgtcactagaatgatgtttccatagcatcccttgtgacctacaacagaggacccctcgcgagcgtttcttgcatgtggatgtggatatcgctggccgggtggataataccggcgtcaacaatgggttccagtggcaatacgagggaaaaaagcagaatgtatgaatgtattgttacgacaaacattccatcccttcttctccaacaatgcccgagatacgaggtacgtaccggcggcgttgcgagagttcttcgcgggtttcgccgccaacggtgaagcttcgatcagtactccgtacggggcattctcgtttcccacggagtcacgggtctcagtggagtccgtcttgatggcaagtgcaaaggtactgtgatccatcaacacacgagaagtatccgggtctcctctttccaagaacaccagcccccaaaatatagtcttcgaattcttccgctttagattaaatcaccactaggatgggagtaatcagccgtaagcttttattcaattggccaaagagatccgaacaaactctggggcatggcgatctgcggaatgagctcataaagacgttgtggggatcgagaatgacgtggggtatgcagcaaaagacaactcctccttttgctcacgagtcatgggatgaggagttcgagcgttcgagattccaaagttgctttccgttcatccatgtaacctcggatggagtttgttacatccaagcgaagggccggtagtcatagtgatagctccgcactccgcactgatcctcttttagtaccaaagtttggaatggatcgaatcgatgatgtctcacctggaaaaggagaacccctagtttttctatagtgccagtggggggcattgagttcactagcgattgcgaagatgtggaagcgcattgtacacgaagtgattaaaacttatattattatgttctatcatgagatctattatatcattaaccaccaaattatgtccaatcagattatgtccaatcaagacttttcttctctccaacaaatctttggcttctccaaatgttccaacttttttgaagagaaaaaaatgcaaaatgcaaaaagtccttacttggccggggccgggctaagcttcgcacgtagtcgcgctccgaagaagaagaagctgtagggaatgagaaccatagcaagaccaatgaaagcaagcagccaagaagcccactgcaagccgagacgatgatacatttgcgtagtaaacagcgggaaggctgcaccaccaccggaacgcaggaagaccttggctgccaaggcggatgcagcgtacttctggtaagagtcgatgatgtagttgttcacagagtagtagcacaaaaccatgccgtagccgaaggcaatgcccgatgaagcagggccgacccaaatgatatgcttgtaagaggtcgcgcccaagatgaacagggcgatcgggatgaaaggcgaaccgagcaaggctccgtggagtcggtcttctggtgtgggggctcgcgagtcgcagattctcttgaacttgtgctcgatgaggggagtggtgaccagggcgaaaccggcgccaatcagaatggggatcaacatgaggccgatctggccgtcgttatagccgtggagctcggtgaagataacggggtatgcgaagaagaaggcgtaaagcatggcgtaaatcagcacgatgtacatgcacattaggtcgagaactggctcggtcattatcatagtgatcggtcgaatcaagctcgtctgagcgatttccttgaatgtgagcttcgtcttttcttgctcggtgatgatgttggggtttccagtttctttgcggagtctggcagcgcggcgcttaagaatcacaggggcatatgtctccgggacaaggcccatcagaaccatcatgagaccggagaaggccaagttcacccagaagaagaggtcgaggcggccacttccaacgttgatccaacctgtgacgatggggccaagcacagggccacagtaaggcgcagcagcaaagtaagcaatggccatgccgcggtcctcaatgttccagatatcggcgatagtgccaccagcgagggaaagacccgaactagagaagacaccgcagaggaatcgacacacaagcaagccaccgatgtttggggacagagcgcagggaatgttgaagatggtatataaaagcatagagatgatgtatacaggttgtcggccgatgatctcggagaggggagaccagagtagaggaccaactgcgaatccgcagaccatgatggaacatgtcaggatagcgacttcgagagagacgtggtatttgtcttcgatcaagcccaatcctccggtgacgatggaggatccgaatgcaacacacaccaccagcatcgaagcgaccatagtgatgtaccagcgatagatgcgattccagttgtaggggtgttcggggtcattgatggtgaatgttacgaactcggcaggcccgccctttcctcccttttcaacgtcgacgtcggcgtcattgtcgtttggtggggcgccgccgtgttgcgtggaggtcgtcgaaacatgggttcggatctgctccagagttgtctggggaacaagaccggtattggtttccacggtatattcctcggggaacacagggtcctgatcatgtccaatggctgggtaattgtaatccaatggtggaggaacttctgaaatgccgcggtcggcgagagtctctctggtttcggtcctggatagacgggaattcaaggcctcgagacggggatcgagactgcgatccaagggctcggggttctccccctcttctggtattgttgagggcatcgtgagtgtgggagattaattagggtatagaaatagaaaagggctgtcgagcctatatatgagtggaaggactgttgagtctattggaacatgccaggtacttgaatgtaacacggcggatacttatactcccaaggtggctttgtgagagtgtcatacttttcaaagccgacgaatggccgaattagaccggacgatccccggaaaaagggcggaaaaaatacgagaaaaagacgaaaacatggcagaaaatggctcagaactgtggcaatgggggcggcaaaatctcggtccgagtgaccgccgacctaattgaaaaaacgacccacggatttcggagtctagcccaactttaaattgatgatatcactgccgatatgccgggcccgtgtatttggtgtattttgtgttttgggctgtgaaaatttcaatccgatcaggttttttagaggctcgagctctctccgccctggacgtgtctgaatgtgtgacgtgctcgacccaggccggacccatctcaggcgggggggcatggcagaattgggatataaagtccgtcttcgaattccggtctggggtttgttcatttctgttttcgaaccccataccatagtgaattcattatacggagtagtactgacttccatagcttcctgctcgtttaatccccgtcggggatgataccctatcttcgtacttattttccgtcagggcattcttcatttgggacctgatctcatattgacgctaagcagaagtccgccaattgtcgctcgcaaatctgacggcattctaattaaactttcacgtttcatttggatcttcttctgaaacaaaaagaaaaggagaaatatcaatttactgtcattcgcattcaaacgccggtatgctaacaactcattggataatctgaccgttaccacgagaggtactaaataatgcctaactcgatattcaaaacaatgcaaccttgcttgaattatatccagacaatattcctaatcctttatcgttgctcctttattcagctatcgatctactgctgcaaggatctcaatcaggatcgcccgctatgtatgtacataggtacactatcataactgcacaggtgggtcagtgaacagaccttaaagtgagacgaatctccacccattgggccgtaaaaacctactgctactaaccacaactgctattcagataatgataattgagctgtgaaggccgatataagccagtatctctcgtagacgaattcctggcactacaagatgactagagttagccgtcacctgtgtctggcttcaaattggcaaggatcatttgtaataataaaattggtgccctacggcttacgtgtgaacagaaatatgcattcgtacactaactaatccgtacacccctatatctctaacatggtatatactccgtgttgatgttttggtgggtcctgggcccaaaaaaaaaaggaatggcgccacccggaatcgaaccggggctaacacagatcattgttataccacaatgtgtcgtcataccactagaccatggcaccctattgattgattgttgacaggaaatactccataaaaggagcttcatcgactccacaatataagcacaactacatcgctagttaaaccactcagttgctattatagttgttagatatatgtgatgtaaatctaaatgggttccagtcatgactttaagtgccttacaaaatgctatgtcgcttatagatgttcgaaagagtaagttggttgcagatatatatctacggggttggagttatgtcacaactttcacaatttatggacaatcaccggtggatcatataaagtaactatttgcaattgaataagatcaagtccccatagaaaactcaaacagcacgcatgacactgcaattattccctcaacatgtatccagctgtaagatgaaacaaatccgaagaaacgacctacccgacccaaccttaatggtaccctcccaaaggtcatgagatgctgtgtatagtgataagctcagccacatgagccgagtagccgggtatgtattggtttctatctaaggtatgcaaccctaagtaatctttgttcgcttgttcgtaaacccagaatctggacgagatcgcttccgctccgttgcctccatttcagctctcataatcctctcctgttcagtcattttcttaggagctgcgaatatagagcccttcttcccagccaaagggttcttcttagccatagcaaacacgttcttcggcttttgtgcacccatggacatcgaaatcttgaccggtgcggcaggcgcagacgaagcaggagcgtcggtgcttcctgtcggtgcatctgtttcttccagcgataccgtcgtcgttgtcgtcgtaggaggcgaggctggcttcgtatctgtcttcttcgagccgagtccaagattcaaggtcatcttttctccttccttcctctgcaataatcttgcctcgggttcagggtctgtcgtagtgccgctagccatcgccgcttgttgggctcgtttgatctgttcctgaattaaacgttgctctcgttcttcgtctcccttctcctggcgttctttctttaaaatggcctcccggcggcgaagtgtgtctggactgttatcaatccatgctatgaccaatcccttatcggtttcctcaacccgacactttccctcacgtcccaaataggccgcaaactgtgataagcttttccattctgcctcggaggttagtattagtccttgcctctcctctccatcgggacatacctgtgctgttcatgtgaatgtgctacaagaaagtcagctagaacgaacaggacaacagtgtaatacaaaagacatacctgtttatcagccacaatctgattatagaaatgattgacgttgataggtttagttccatgcgtagttctgagggtgtcgaggaaagtgcgctcaaattcgcgactaaactctctgatgtgcttgcgcgggtcttctccaatgagcatcatctgtcggactaatataaagttagtcggtggccaggacagaaaagagaatagagaccgtaccatgcgcttcagtcatagtgtgacatttgaagccgttctcatctcgacattgtttctcacatgcctggcaaaaccatcgaaggcgacccaatcctttgcttttgatcttgttgccgatggcttttgtactgcctggttccgcacgacccattttgtaggtcggtaaatgaaattaacgtaagcgttcggaggaggcgacgagacaaaaatgcttcaaaggaccaatagatcggaaagatggtgtatgttgagaagcgtttgaagaaagtagtgcgagaagctttgaggtggcgcagatcaacgcgataagccgatcgattacataacatatcacatgacatagccaaaaaggcctggtcccgagcttccaaaattggttagttgattccttaattcgatgtcgatatggatgtatacggagtatcagtggatgaaacgaagctgaatacctaggttcattgaaatattccgacaaaatgaagcaaaactcccccaaatcctacgcctgcatcccgatatcgcttttctacctaggatcatagcgtacgtaaagaaagatgtattccggagacaaaccagcaaacctcgccaagacgaaggtatgtagcaaaaaaacaaccaaagaaatgtgccatgaaccaagatggatattaaatcaccgagtctgcaagtattacaagatgtactcgtggattgcagacggcccgctctcgttgtactcaacacggctcatgtaacccttgctgagaccctgatcaatgacaaagaaaaccttggcggccatctgagcgccgaggaaaatggcctcttctattccatggccaccctgggatgtgccggacgctcctgggttacccccagcactgccaccgctggcgccgggagcgttgctgttgccctggtctttgaagtccgggaaatactcaggaagctttagagtcttgactgaggttggggtttgggagtggccggttgagcggtagtgtgacaacatgccggggtccatggagggcgtgccgggcataccggggttgttgtgagttgcagccacaaggagagggtttactccagctgccgaggggtggtacatctggccaggagcgggtgtgttggcaccggttggaagaggggtggtgaagttcgaaggaatttcagacgtgaagatggtgccggatggagaaagtatgaacttttgcgtgatgacagccagcaaggcctgtgtgaaacctgttttaatgttagcgaaataaccgaactctagatagcaatgataaaacatacccttgactttgcttccacatccaacgataattaaagagtcccaaagctcgcttcgctttgtagcatctggaacggcaagaatagtgtggtgaatctgagtcgcaatgtcctcgaggataccgctggtcaagcggtttccaaccttcgagcgcggcgaagtcaaaagaaaacgctcaacactgacttcaatatctcgagtacgacgagtgtactgccgagcaccgtgggctgcagccttctctccttccaccggaacaaattcctcgaactggaaggacgccttctcttttttcgagttaggcaggcgggttcccttggggtcagctgcgcctttcttggtagttgtcttctccttctcgacattggcaaggtattcagtggggttgccgctgacaatcgcagcgacatcgagaacaccctcatcatcgtcaccattatccccctctattcctgtctgagtgccgtctcctggaccgcgcggagccgactcatctccttctgatccgcccgtcgaggcaacagcagcagggttggcgccctggcgagcagtagcagaggaaccaggcagtggggttcctgggggaagaatctcagtaatattgcttcgcttgagttgctcgcacatctctctggtaaatcccttcggacccagcagctcaacaagacgatcggtcatagcgtctccaccacacccctccagtgcgattcctctgccgtgttcgttgaccgcgaagtcggtcacagcagtgacatcaaccttgccctttccaacatcgacaacagtggcggtaggtgtaccatagccgtagcaagccgcaagagcagagtccataagactaaacgcgggtgccttaaacttctcgaagacgaattgagtgatcgcttcgcgatcgcgtgcggaccagacgggctgaccaacaagcataatcggagtgtggaaaggtgggctcaaggtattgtggatgtgagtgagcagggcgaagaaacagggccagtcgacgatgcgcccgttctcgaagggatagattgccccttcgtcggatgccaggtcctcctcgtagaagacttcttcaatagtcttggttgactcgtcattatcctgagtattttcgtcggtcttgacagtggtcccatcagcagcggattcagcgtccttcatctccacgtccggctttgtgtccgtgccattgttgaccttgacctcttgacgtctctcgagaacacggtaaggctcatattctcccttcttctcagcagggaacatgcgcgttgggaaccgaaatcgcgcgggcgtgaatgtttcaggcaggccgagctgcgccaaggtcatttgcgaacccggcgcaattagctagacgaatggttaaaattgaacaagaaaatatgaagaactaagcttaccaagatatgctcatccttgaagggcggcatcgttatcagtggcagtgacgagcgttgcgacgagtgatgactgcgagctccgctcgatttgcgttggttactctttcttcccattgtggtttagcgtgatttggacgaatcggagtcggtggttggtcggggaataatgtttccgaagttggagagttgaggtctacttctgcgaggtgacaacaacaaaccgcgatttacgcagccagaacgtattaactctggaatattttgtcaataactataggtgatttgttactttattgaatttaggattgtaaaatgaataaaaaatatgaaaatgatcgaacatgacatagctatactatttacatagacaggatattacgcagtacaatacaatatacacagaatttgtctataagctcagtcagaataagatctatagatatcctccaaacatcatgatggctagcaaactcggttttgattgaatatacgttgtatgccgttcggtcttctatagagaggtagaccatgcctgtcaaacattcaaatcatatgcaattaactaatgcattgtgcgctttcacgccattaatagtatatccgcccacagcctatccccctaaagcagagaaagaaaaaaaaatctgaaaccatatgaggaaaaaaaactccagacccacatatccggtggaacgccatcatcctttgcactctatgaccagcacgagtctaaggtgattctattctgggacagcatggtatttgtcagtcgctgatcggaatagctcctgctgttgccttagaagctcctcttctgtcagaccactttgctccatcttgctctgcttcttctctcgtgactataattcagatgagaggtcagcctgcgctcgaagctatcacaatcccaagaaaaatatgaacataccttcagctgctgcttatgctcttcggcaacagcgagtacatcggcaatataatcactgaaaccgagatcccgtaatgccttctccacatgttcacaagcgatggtcttcttggcctccttctcgctgatatcgtttgcttcggaggagatcagtgtgataaattcgacacagcattccatgagcaagtcgcgcgcatccttggagaaggtttggccggagctaggtggtaaaatctcggtgataatcttttggaccgtcgctattagataagttagcaaatgctaacaaacacgtatgacaagtgtataggcggtgaagcggtaagaacctcaaaaagagctgtacacattcacaaggttattgtaccgtacctttaggcagagataggtcatcgtttgctattcacgtacaggtcagcaggttgcgcgtaggcggccaagatctagagatcacttacagttgaattctcggtcagacatggcgaatcagatgatatagtgatagacaacaaaagaacaaatgtcagatcgagggagaggcgcaaaagggatgctttaatttctttgatcttttgcgtggggctcaaagtttcaaggcccatcgcaggcgcgcgacggagttaagtacaatttcttgccggcagaatactaccgctttggaccacataaattgcgctgaattttcttttccgttgacatcttcttcatcagtcttcaatctcctccaactaccttggaaagagtccttcaaatgagatcgactccttccgaggccacacactaatggtaagctcttgttcaaatcccttttcccaatttctatcatgatgaactttgcttgtcgcccctatcatacattctatggtgaccttacctgtcctagccaaacggactatctgatctctatcaattctgcacatttgcatctcacttcatttgtttgaaacggttgctaactttattgaagaatttgcaggaattccatctcttgttattgtagcttggaactcgtttctgcttggatgacatccacagaacacatttggaggacggggatatttacatctgtatctaaaggtacgcgcataatatttgctatattttcagttccaattacatgatgtatacccttacattccatgctaaacatgaaggtgcactgcgcctaatgcttataaaatgtattgcttttcatctttcgactgacttgtaaaccattgctgcctcacatttacattcattgttctatggcgatcgttactgacttgctataaagattacagatatgaaccagaattttatactagctatcaatgatattattattcctggaaaacctcgagctccttgtcgttccatctgccaattattagtatttctcgcgtaatatgtgtaggacagcacatacgaatagaaacgaccgctgatttccttgggcgcatcgagtaccagcttggccatgacatggccgggctgctcgggtttgaggagcttgccgttcttgtggactccagtgaacttggagtgcatttcagcgtccaaggctgtgccatggtcctcccgcagggcacgctgcatctcggtgtcgaccataccaggtctgatagacacggaggtgacatcgggttcttcggcacccaggctcatggcaaagttgttcatggcggctttggtggcagcatatagagcccaaccacggtaagcgttgactgcagcgccggaagacgtgaagataatttttcctttggactcacggagagccggtagagccgctttggcctagttcccgttagtagtgcatggtagatttgatgtaggtcccgtacaaaggcaactaagctgataaagttgacatcaaagccttccttccactgctgcggatcagcgtcggcgattttgccgacctggcctagcaggccgtgattaaggaccattccatcgagctgaccgaaggtcttgatagctttatcgacggcctgttgggcaagagaaaagtcggacagatcgccattcaggattgccacctggttgccgtattgctccttgagcttttggaggggttcaacgctgcgggctaccaccaccacattgtgggattgaggtgcggtgagcagatacttggccacagcaagaccgatacctggttgatgtcagtctatcattatgcacaaagtttgaggggtgtacctcttgaagctcctgtgacaatgatggttttggctgccattttggtaaatgctctagtcactaggtgttagtggtaggagatcaacacagtgacaaatgtaaagagtagatgctagattcgaaatgatagcggcaatgagaatgcatgacaacaggttttggtattgctttgtatgccaagagacttgcataaacttgctcaagttgtctcggatatatatctgaacagctctgcaaagctaagaactcaagcattggggaatgctggttgggcagctggtgtaacctactcgatgtttattctgcagatgtcttgagccgaatatcaatactggtaaggaatgattatatgaagatggacacattgacagagcaccgagagaggtctagtgcggggcttattaatctcgtggggtcgatctcgggacggtttccctatatggaaggccgacggacgtcatgctgtatgtacatctttcgttttatagagtagtgtatataaaatggaacctatagtaaggcgtattcttgagcttcagtcaaagtagccgtgtattttgcaattcaaaatgagagattggaggtattcttcttacgtaggtagactgtgatcgtggcgcagcaggcaaatagcttcaagaaataactttaatttaaagattacgcttaaagtttaagatgatacatcataaagccgcacatcccgcagcaaaaaaaaaggtagaaagaggcgttgctgtcacagtggaagcataggggaagagaacttgaccgtatagtgtagctacggcagccacccaagaggggccggtcacgtggtagccaatttcagagaaccggtccgagagatccacccgtcgataggaaacactttcacgatcgcccaaaggagtcaacttttgcgatcagctccttctctactccacagtatttttaagtttggatccaccggtagcgtgtaccatcatctaaaagccatggaattcctcccggctatcatcccagcacttgtacatattcccgggccggtgcaaaagaaaccgggaagcaagatcatagattgccgagaaatataagctcgaacactcccatttgcatgcattaattgcaacccatgctttatttcgacaatccgcgttgataagcgtttctaattttgcacctacaacagccagcatgtcgaccgtcatccttggaggaggtatcattggagcctcaattgcttactacctatctgccaaccagccagaaggcgatattcacatcgttgagcaatccccagagcttttcaccgcagcctcgggatatgccgcaggtttcttagctagagattggttcgagccatctcttgcccctcttggtgctatgtctttcgacttgcaccatgagctcgccgcagcggaaggcggagacaaaaaatggggatttatgaaaggaacagcgttcaacttggataccgtcgctcaacgcaagcgagggggtccccgcggtgatgattggttgcgaacgggcactagtagagcagagactgcggctggctccgaggataccactccggttgagtttccggaatggttgacgatgcagaaagagggaatactggagaaaatcagccagggtgaaaccgtggctcaagcgtgagtatcaaaccgaagcgtttcatgaattatttgctaattgtgttcagagatccattgcggctgagccaattcctcattgacggtgctatctcccgaggcgctaagcttcataacccagcccaggccaccgaagtggtcaaggatgcgagcggcacgattacaggcgtcaaaatcgtgtctttggattccaagaaggaatcaataattccgtgtacgaaccttgttctgagcatggggccgtggacaccacaggtccttagagagctgttcccctcttctcaggtatcattcgatataacgcctttggctggctattcattggtccttcgatcccctcggtatacaatggagcacgagagaaatgtttaccgtggaagcagccatgctgtatttacaacacaccctccgtcgtgcgggtttagcccagagatcttcctcagggaaggcggggagatttatatcgccggtcttaacaaccccgccatgaagcttccaccccgtgccggtgatactacccagctttttgatcccaccgagattcgaaagctcaaagatgttgcaattcgtttaatgggggatcttcccaagggtacaaaggaggctaccgacgagaaggccaacacagatgacttggagattatccgtgaagggctgtgcttccgcccggtgggaaatactggtgttcctacaattggaagaattggagattactctttgggaagtgtgaaagcaaaccccaagggaggcgtcttcatagccgctggccacggagcgtggggaatctctttgagcctgggaactggaaaggttgtttctgagatgatcaaaaagcaaaagctctctgtgaatgtgagcggcttggcggttcaggacaaagttcctagttccaagctgtgagcatttgatctgcaataggaaagagctccagatgtccgcctaaatgtgcttttccaaaggtcactgacaaagcaacattgtagctgcgtacttctttaatctcatcgatttcatcctctgagtgcgcacatattgactttcgaaggctcccttgtcggcgttaacaaagagcgatcatcttcgacttagaatttcaatacctatttatcaaactaaatgtcgaagagctcaaaatattcgtttgatactaatacgatcagattggtagactcgacttggttatacactttgagtactatttccctctattttccctctcctttctttccctctcctttctttgacctatgatactggcttgtaatgagatcaaatcaaatatctatctataactcatctccatctcaagtcagtctcgccccggttctaaacctagcgccagcatcgggagtaaaaataggtagaaagtcacaggaaaaggcagactaagtttgggactgcaggtacgctaactcactatgtaactaaccagttatagctcttcctaagtaagctgctttgcctaggtgacagtttcttttccaatatctctccaaagactttttttggatgagttttttttttaaagaatactatcaaatgtttcagtgttatagccagaataatacaataaggatcagccgtgaaatatagaagatatttgggtaaaggtgtgttcagatgtatatctaggaaatttactaggcgtcggagtatagataatccgacggaccgagcagctctccgccactcgagctctccagaatcttcaagcatccgatatctcccagctttcaaagcaccgtcgctttgtgcctgtttcttctgcaaccctcccatccaatttcaccttccatcaattcttcatcagccaatatcagagactgcccgtaatcaaccatggccaactaccttgcatccatcttcggtaccgagcaggacaaggtcaattgttcgttctactacaaaatcggcgcgtgccgacacggcgaccgctgctctcgcaagcatgttaagccttcgtactcgcaaaccattctcatgccgaacatgtaccagaacccggcttacgaccccaagaacaagatgaaccccagccaaatgcagaaccatttcgacgccttctacgaggacgtatggtgtgagttgtgcaagtacggcgagctggaagagttggtcatctgcgacaacaacaacgaccgtaagtagtgctctcttcaaaatttgtgtctgaatctactgacatctgttttcgcgacaatagacctcattggtaacgtctacggccgattcaaatacgaagaagatgcgcaggcagcctgtgacgcgataaactcccgttggtacgcagcgcgacctatctactgcgagttatcacccgttaccgatttccgagaagcctgttgtcggctcaatagcggcgaagggtgtgtacgagggggcttctgcaatttcattcaccggaaagatccgacacccgacctcgaccgcgagctgcgactgagcaccaagaagtggctcaaggagcgcggcagagatcctcgcagcgccagccgcagtcctagccccgagcccacccggcgcagatactagtggtgtgccacgacgaattttctcattgttgtttccctacattcgatcctttggcgttcggcgatatcagtcggtggttcaattccactttcctttgcgcagcggcgcatccagggcatggggtctcggtttgtctttacatttgctggttggcatttgcgtttcatgatatcaaacttgcgcgatcaataaaacccacagctaaacttcatgtataaatctcgcttagtaattccttatatgtaccacctggtaggtagttgaagccgaaaccagtacgttgaccagcacctactgagtgatatcggtcaaggaaactgattcaaagctctctctatagcactttgaatccacaagtcgttgtcagaaaattgcaattgcttcattactaattaccaatatttcaacaacagcacgcgcaatttgactaggagaggtcgacggtgcagtgagctgtgcagtgtcgcggccgtagtcatagatgtcgtggaagtcgcttgatgtttggctttggctttgacaccgagattgaagcgtcgtatgaaaaggagtgcatgctcatagtcgtaatacatcgggtcactcgaagtactgtttcatcttcggctttttctatcacacacataggcagtgcctggtgcgatgcgttttaaaagtctaagtagatggttacataaattatgaatccgcctcataatctatcttccgcccggatggtctagtggtatgattctccgtttgggtttccatctcaaattcggagaggccgcgtgttcgaatcgcgcttcgggccctcatctttttttgtttttgctccaaagttctttacttcaatgtatgaaccagcgcacgcaagtaaagtcaagtagagacaaacaaatcgtctaatgctatcaaaaaccatctcatacgattcacaattagggtggttttctctcctcgtcactttttgtatgaatatgcctcaggaaacaaatttactaagcttccttatcgcatgttcttatctttctttcatctacagccacgcgagcgcgtctgatcgcgtcaaagccagtacgccgttggcacaaagagccttgaactgactgatattgtgaactctgacaccctagagcatgatttatggtcgagaatatggctggatataatgacagcaatcgtgcctttctccaagcgttcatggcacgttcgtctatgacctttgaagatgcgcaacccatcctagctgcgatattaacagtatctggtacctaactcctgcttgatcatggtgctatgaataacggtagttgctgacgttgaaatgatcgaacagaagggcgaacagtggatcccgatgagattgagaaagaccaattctccgactttatagcggcggctaataccgccgtgtcacccttcgacctcgaaatcagaagcttactgccacaagtaatcgaaccagcccaacaagatgccccagccacacccccgaagcgagtctatgcgcttgtaaatactacgagtgatcctttgacacagctcgcgaccacctattccccggacgagatcgcgtttctcaagcgcttgctggacttcatgtttgcgaaaaataatacacgactgtgtgaaggcatggtagcttcacagatgcaagctgtttcactccataaggctccgtctggcgaacggcaatccacgagcaacgactcggcgcagtcgcaaaccgcagcggtacagtcactgcgtatgacccaagcagaaaccctggtcattcacttgattgaagagggctggctgcagaagagcgcgaagggatatcttagcctcacgccacgagcactgatggagttgcggggctggttggtcttaacgtataatgacgagagtttcgatggccgagctgtggagaggatcaaattttgtgctgcttgcaaagacattatcaccgtagtaagtatacttaccgctctttggtatgaaaaagatctgactgagatactccagggtcaacgctgtgaagaccgtgactgcaagggtcgactccatgaccattgcatgcgcaacttcttccggatgcaacaagcagagaaatgtcccttatgcaaagtggactggcctggcgataacttcgtgggcgaacgagcgatcacgaacccgaagcaacgcaacaccgttccacaacagaggaggtcttcgtctgctgcgtctagtgccgttggcgaaggttcggatgacgaggaggacgaagaataagagaattgaacctctgctggctggtgaaaaataccggttatgggtcttgcctctgcttgaccaagcgtcagttacgaaatgggttcaccgtggacacgcccatgtgaatagcaacgaatgaatgaacgacatggaagattatcgagcgaggattgctgttagttagtttgaggtgacatccaaagcgatgttctatgtcatgtctcgactgcattcttgggatttttgataaggctcaacctttctattttgttttaagatgtaactagatattggggattatgtacatgggaaggatgggccttgtaagatacaagcgggtacatacatgatcttggatgacctatgaaatgaagtcgaatacttgaagctattgaaatgcatcttactggctggcatatcttagacatcacgcgataggtgtctgaatatgggcatgcaaatatggtacagtggaaaaaccggcgtggtcgtggtaagttaggggaaaatacataaatgtggtacgacaaggtaaggtacggtaaaataaatctcaagccatcgattttctcttggcagaagcccaaggccttggattcccagtcctgtctcactccgtactccgtgctctgaacattcatcctttatctcttcaagggtttcaacctggtctttcaacaattgatgtgctgtataatccgctaccttccggcgttttgccgaacactttactaatatggaacccccaacttccccacaaacccaccaaaaccctcgagtcgcgctagacttcccctgcagtcgatgacgaggtcaccccatctcaagccgatttcggtcttcacagccaatagcccgattttatgtacacaatatcatcatattggtcgttgcttcccgcattttccgattctcccgtggcaagccgtcccacatacaagccaccactgatgactcgtacgccatttccccagaaccttgatgccaatcctcactagaaggagtagtataaccgacttggaactgagaacatccactctctgaccctggaacgggccagtaggcttttgactttacttccccacatttcaccatgcgttcatagctggagcgattttaaattgctactacatcggtatagggacgtgcctggatcatctcatgtcatgctgatttaggaaagcgccattaatctccatctttccctaaaaactcctcttgcttcctccatcatcctcacttatgaatagtgctgaccgcttcttcctattcaactcgatatcgacttattcgagcatctgacctggttgacaaagcggtgaaactgcaatatgcggtttaaagtgagtttgtactcctatgtccttgctgatcatctaacactctgcttagtccttcacatgcgcggcattgcccctatttctgaatcttgttagcggctctcccgacagtcgtatcaaaaggtgctttagggaacacacaagctctagctcggccaacttcagcaacaatgtttaccagaccggcttcgatggtgtgatctgggacgaagacaactggcttctgagctcaaccaacttggaacagggtcgttttcaatctcgaggatccgtggcgaacggatatctgggtattaatgttgccagtgctggtcctttctttgagattgatagtcccgatgacaccaacggctggccacttttctctagacgccagaccttcgcaacggtcagtgggttctttgactcacagcctaccaccaacggcagcaacttcccctggttgtcccagtatggagacgatagtgtgatcagtggtgttccccactgggccggaatcatcttggatctcggcaatgatacatatttggatgcaaaagtcgacaataagagcatttccaatttccgaaccacatacgacttcaaagcaggcatcttggtctggtcctacaaatggacgcctcggggcaacaggggatcgtaccagattacctatcgtcttctcgcccacaagctgtatgtcaatcaggctgtggtcgaaatggagattatcccgaccaaggaatcgaatgcgaccattgtcaatgtcattgatggagcttctgcagtgcgcagcgacttcgtagagaccggggaagacaatggtgcaatcttctcagcagtacggccgaatgggattgctaatgtcacagcttatatctacgcgaacctcactgggtcgcccaatgtggatctctcttcgcgcaagattgtgcccagcaagccatatgtccattccaacaaatcgtccattgcgcaatccgtagatgtgaagttcaagcctgggcaattagttcgtgtcatcaagtatgtcggaggtgcttctacggatgcctttgttgatccgaaacaaacagccaagaaggctgcctccgctgctatgagcaatggctacgcccggtctcttcgaactcatctcatggaatgggaaaacgttatgccccaagattcggttgaccactacgcatttcccaatggcacattgcctgcagatagccacatcattgatttggcagtaatctccgtggctaacacttactacttgctgcagaatactgctggcaagaatgcagtcaaggaagccgcgggagcaccgataaatgtggacagtatttcagttggtggcttgacctcggactcctatggaggccaagtcttctgggatgcggatgtatggatgcagcctggtcttgttgtttctcacccagaagcgtccgagcggttcaccaatttccgtgtggcaaagtatgcccaagcacgggagaatatccagactagcttttctggctcccagaaccagacaaatttcagtccgtcagctgcaatcttcccttggactagtggccgatttggcaactgcacggctactggcgcctgctgggactacgaatatcatctgaacggagacattggaatctccttgattaaccaatgggttgcaagtggtaatacaaagttattcaaagaggaacatttcccaatctacgattcggcggctacgctctatgcggacttgctggttcgaaacgggtcttattggacattgaccaacatgactgaccctgtaagtctggcgcccatctctttacagcacccaaaactaatataaagtaggatgagtatgccaaccacgttgatgcgggtggtttcacaatgccactcattgccgagaccctccgacatgccaacgccttccgtcagcaattcggacttgaagaaaatgctacctgggatcaaatggctgacaatgtcttggtgcttcgtgaaaacgaggtgactctcgaattcactaccatgaatggaagcgctgtggttaaacaagctgacgtggttatggtcacctatcccctgggctatactgccaattacaccagccaaaattcgctgaatgatctggactatgtaagtattttgattcccggaaagagagccaaactaacaagatctagtacgcagcgaaacaatctgctgatggtcctgccatgacctgggctatcttttctgtcgtcgcaaacggaatgtcgctatctggctgctcatcatacgcatatgcgcagtactcatacaagccttatacccgtgcgccattcttccaaatgtcggagcagatggtggataacgctaccatcaatggaggcacgcacccggcgtatccattcctgactggccacggtggttccaatcaggtcgctatctttggttatcttggattgcggctggtaccagatgacattcttcacgtggatccaaatttgcccccccagattccatacctgaagtatcgtaccttctactggcgcggctggcccttctcggcgtggtcaaattacacacacacgaccatcagccattccacagaggctcccccactggagactgccgatcagcgattcgccaacaaaacaatcacgattcactctggccaagaagtcgataccaccatttaccatcttcctctcaagggctctgttgtcattcctaaccgacagactggatcggagaacaccgtaaaaggtaatctcgtgcagtgccaggctgtttcctcttcggatgcattcgaacctggccaattccctatttccgcggtagacggtgcagcctcgacaaaatggcagccctcactggcagctgagctaagctccgtgacagtctccttcgaagatgaggctggcgctatggtattcggtttctacttcgattgggcgcagacacccccggttaatgccactgttatcttccacaataagaccctagaagatcctgcgacagcgctttccactcaaagctcggactacacaattgtgcaccgcctgataaacatcgttcaatcgaacccatacgatcctgataccacaaacctcgatagggttgccatccctaccggaaacacaaccaatgtgactttatcatctcccataccagcagcacgctatgcgtctcttcttattgtgggaaaccaagcccttgactctgttgatgtggaggctaagaatgggactggtgcgactgttgccgagtgggctattctcgggcaagcaaacgcaagcactgcctcagcctccaaatctgcaaataagaagatgaaagtgcgtgtagcaggaaccttggtagatacggatgcctttatgcgtcggcgtcagtttttattctaaatttagatgattgacttgccttagagttaccactctcttgtaaatacaatacagtcttcatttgatttaattctctaccaatacacttatcgagtggaaactcacgaatgaagtgtgctccaagtaatgttcgagttgtaaattgtgacaattgaacagaatcgcacctatttaaattgatatatccatacatacagtcataaccaacatcccctactcatcaagcgcgaaccgatccaagaacttgaaggtccgaagtccctcctttatatctttgacaaaggcactcccagcattgctagcagtgtacacaccatcgcggtccgtagaaatgagtgcagagcgtagcgcagccgagcccttaccgagcgcaccaaccgtcttcccgaaccggaaagcatcgagcagaatatccaaaggccgaccagcgggatacaaagacgacgcaccagaagccttattcggcacgctagtaatcgacttggaggcaaacaggccctccgcaccatccgcgacaacaacagcatcgaactgcactgcgtccgacgcagaatacgtctgattaacaccatccgcaaacctctccgcaacaaccacgacatcaacgcccacagcagaaagcgcagactgcagcttcgcgccctgcgcaatagacgccggcttatcgacagacgcaaggagtccaactttcagcccatctagtttggcgagtttctgtccgaaggcgccgatatgcgcggtcgtgttgtcgtggtaaaaggttggatctggcttcggcgcatcaatgccaatggcctttgcgacgcgcgtcgcgaggtcgttgctgatgcggtttagctggatgatgacgttgttgcgcacgacgctgctcttgacgttggatgtctcgaatcggatcgcgtctacaatgaattgcttctcggcgggtacgagcgagttccagaataggcgtggctgggaccagacgtcttcaaaggtagagctgacggtgcgttggagcttgccgcttgatgtgcggtcgggtgcggtgaagaagccgttgcctacggtttgattggcttgttttggggagccgttgttttctgtgttgggggagtaggcgtttgggtttagggggatgaacatttggcctggggtttgttagaaagagggattggaggatggggtgggtttggtggtgggacgtacctgctccgtcgcggttgttgttgtggattggtacacggggccggttgatgggcagctgctcgaagttggggccgccgtgacggttgagttgggtgtctaggtaggagaagatacggccttggaggagggggtcctcggtgaaatcgacgccgcggacgatatggcccggttggaactaagaaattagtattgtaagtggtgatggtgggttgggacgtaccatgacttgctcagtttcagcaaagtagttcagggggtttcggttcagttgcatcttgcctagcttggtgacaggaacgagttcctctgggacaatcttggtaggatccaaaagatcaaacccaaaccgaagctggtcgtcttcctccatgatttgaacaccaagctagcaaaaaattagcaagaattgcgatggatatggggttatcacctacctcccactcggggaaacgtccagcttcgatagcttcgaaaagatcctgacgcataaagtccgcatttttaccagcggtctgctgtgcttcctcccacacgaaactagccttgccctgtagtcccttccagtggaacttgacaagcttagtctttccatcgtcagtcactagacggaaggtgtgcacaccgaaaccatcaacatgacggaaagaccgaggaataccgtggccagccattgcccaaagaagggtgtgaagtgcactaggctgctgactgaagaagtcccaagccgagtcgtgcgcggtagcagcctgagggatctcgctatcgccacggggcttgacggcgtgaatgagatcggggaacaagatagcatcctggatgaagaaaacggggatgttatttccaacaatatctagatccaaatcagttgtgtactttcgtcaaaaaaagatctgccgtaccgaagttcccttcatcagtatagaagcgagtcgcaaagccgtggacatctcgcgcagtatcggcgcttccgcgactgccagcaacagtagagaagcgcgtgaacatcggggtttgtttgcctttggcagaaaggaaagacgcggcagtcaggttggaccagtcgccgtacgaggtgaatgttccgtgggcgccggcgcctcgagcatgaacggcgcgttccggtaccttgaaaaacagatatgagcgttggaacttcgattaaaaacgtggaacacatacccgttcatggtcgaagcgttggatcttctggcggaaaatgaaatcctcaagcagggtggctccacgctctcctgcgctgagactgttttggtcctcgatcgggccgccaacatcggaggtcagaaagacatcttggtccttgaggtagaattgggagagaaattcctcggtggaagaagcatctccatcacctcgtctctcgagggggccagcttcgccagtcatataaggacaggcagcattggcaatgccaacaagacccgtaacgagggcaagcacacgcattgcggcaggtaagtaatataactgttaatagaaggccagtctcaatagagttgtcaacaattcaaacttcaggtgaaaggtgaaagactcggggctcgctttatactccgggttgaatgtgaaccccaaacaaaacagcccagtgcgacttttgcaatgggccaatgggaagctccatgaaaatgctatgacgcagatttcaggtactattattgatcagacctgggctggccaattctccaaccaggaacccgttgattattccagcgcaacggccggccgagactaacagtgtgatgagatcgaatcacctgttggatatagtggggcacggctagaggtgttgaccgtctccacgagccaaggagaagatgagagacactatgcatgcattgctccgaatggtagctccaatggaaatgctggggtgttgatccatatgcgggccataggaatcagcatcaggttatcatggcgccactagaaggaaatggcaaaatggcaaaagatttaagctgactattgaaaatctcggcgactctttgaatcggaatagccggataagcgtcaagtcaaccgttgcatacaacatagcgaagggggtgaaggggtgaagtcttggcggttgattaagcgtaggggcacgttggtcgaggccgcgatgcttggtaattggcgagtgacatctgggcatccttgcaagaccacttagcgtccgtttaaatttgaaaacgagacggattatgtaggggatctgcaccctagcgtcaggaaattatgtctcatgttggatttatctcccaattgcaacgctgatatctaggtaaacaaacactcgcattgcaacatcgccattgcagtctagcactcgaaattgggacctgaaaatctacagggattaagctgcagtgctcattaccaagaccagctcctgcagctgatccctgtcaacgcacatctcttaccacttttagaactcatccgcaacgcagttgggatcgtctgtgatgacccgtttgtgttagtgatgttgcatcggcctccgcggaggcacaacatggggaatagttaattttagatcttcggggtcttgttctgcatcaaatgacatgcccatgtgctgttcgtggctgcttattgttgggttcgcgtggtgtgagatgcttggcggggaaagaaataatctagccagccttggaaggtgatgacactggtccttgacgatcttggcaactgtgaacttggcataattagttgtcgctaaagggctatttttaatgtgatatgtgtgtgatagagctttcggccggggagtacggggtatttttgtgagaggggttgagatgtctttttttggattgagaactgtctttggatctagtagaataatacggatatgctatagttagatagaactgttgaatggacagaatcaggtatagtctagacacaaaagaagacaaagatttatgatcgaatgactacggagtattctttctataattcaaacagccacatctccaccacgaagtacggagtatcccgtctatcataccaccaagtactccgtatagtagtatactcagccgatgacacaacaaatctatcctcgagccatcgcaaccacctcaccgggactagcggggtcactgcgatccacaaacccatgtttcgcatacagcggaacaccagccttactagcatcgatgtacgccgccacgccttcccgatccgcaatctcacagccccatagaaccagcatagcgccagccccgcgacgacggtagtcgggatgcgtaccgagcatatcaaggtctatgttttactagcgtcaacaaacagtcccccagcagaacaaaacaagcggctaagtagctagctctcgagtgatccaactcacagtaatgcttccgatcacccatcacccgcctgcgctcgctctccagccctccaaagaaagtatcgcaaacctgcccaggcatgtccccgtgccaaggcgggaaccgatccccgcgctcgtcgggcatggccaggtcccatttcgcatatgcgactatccgcgccttcccttgcgtgtcagtggtgctggggtcgatgatcttgatgtatttttggaacggctttgtgagcatgtcggtgcggttggcttcagtgaaccattcgcgtgtccctggtgtgtcggggaatagacggcgcatgcccgggtcgttgaacgcggtgaaccataggtctgtaatggccgggaggtcttcgactgtcgcgggttctaggactagagggtttggggtagacattttgggctttttgtttgcgagttggttgttgggacttgtcgcggggtagttttaggtcgactgcaggctagcggtcaatgctacgttgatttggaatagtcgggctagtattagttgattattatttgaagtctgagtcagacatatattaaagagatacataactagactagaacggaatccttgctcattggtctcttttatgtatatgcaggtctaatttttgagtacatcaaataaaagaggcagcccagggtcacccaggtatagttggttccaatggcataaaagagttcccttctcatgtagaaagacgaggtagttggaaagactctccgtgctctctcatatatcgcagtttcgtttcgaatcagtttggcgggagtcgtgcgaccgaccaacacgacttagatttgaaagatgagacgttgagcagataggattattcaaggaccattcgggcatgtttcataaactgatatccacttcccaaatggcgtttttcgtcaacgggtggcttgggattggatttccgggagacgaaggggatatagtaaattttgatttcagtttcatgggtttatctacaattcatatttacattgaatgaataataacaagaagattgagggatagacgtaagaatcgcccagcctaggttcaaacagaccgtctatagagggtgcccttaagccaaagtctcaagtgagcggtaaaagatatgcgccgacactatatcgaatgttagcaattgcatctccacgagttataaagtgcacatacgaaatagcggcaaagcaggcacacaagatagcaccctccaaataattagtctttcccttgagcacgatgaaatcgaccagaataacagccccgatcagagtgaccatctcgaacttgtcaaaatgcaaggtcatgggcttgtcgagagcccagccaataagcaccatagccggcgaaaccaagagaccgatttgaatggccgatcccagagcaacactgatggcaaggtccatttggtttttcgaggccacaacaacggcagtaacattttcggcaacatttccggcgataggaataatgatcaaaccgacgaatgattcaccgaggacgccctgttcgttgagcgttgagaagcttgaggagaagtattcggcgcatatggcgatgagaacggttgatagggcgaggagggtgacggatatcgttcggttggacttgatcacgtagcggtcgcagcgacatggtccatagtctcggataggtgccgtttgtctggggaggcaccttccttcagatgccgtgtgtcggtggagggtcgttcttccttcagatggttcgttgtggaacagtggcatggccgctgccgtttgtgcgtcgactgagcatgaccgtgatcgcacctcttgcatctctagctggcggatatgtctgcttgttgcgctttcgaccgtggtgggacgcgattcgaggtcgtctgtatatagaggatcgattggatgcggcatttggagccgcgtggagtggaacaagtgagcgtgtgatttgaactggaagaaaaggtataagaaatatgtgaggagaagaatgatggacacccccctgctgaaggataatgacatatgatcagcagaagtgacgctcttgacgctgccatagaaagcggtctatgttcaggattagtattggaagcaatggggatacttggaacatcgccttacgggaatcataaggcaagagatggtgagattgagaagtcccacaaatgactgggtgagatcggtgttatacgtcacatcacttgtcgaaatacagcctgctataattgcagatccgaggacgagcagaaggttcacaaggatggagccgaggagtgatgattgaactactttaatgttgtttttcaacaaagcagtgctataaagattagttttggctccgccgacttatcatatgaaacttacacactatatgatagtcagtatatatagtttgaaaataagtgagttccacattgagactcacaaaataataagctccgctagattccctatcgtgatgttgaggagagcgccagcggtctcacccaaatccttggatatcctctcggtggcttctgtgagtgtgatcgacagcggcacaatcgcaaggaggttccatatgaatatcacaagcgccgggcttttggtattagagagaatgattgccgatgcggcgaaggcaccggagaagacgatcctcggcctgagaatctgttttgtctgttgtttgaatatggagaaggaattgcagggtctgccatgatggggccacccagacaacgtgtcgtcattggggatctgtgttttgtgtcgaagaaagctttttactttatggaagatgtcgtcggagattgaattcgtggaggcctcggctggtccttgataacgataagaagtccatgtcagcttggacgacgccggcaattggaggatagtgcggactcactgttcatttcatattgacaaggataggagccactagaccggggctcagattcgaaggaagtattcagggcgtgctcgtcacttgagctttcagcgaaggtattgatgtcatgaaggttcttatcgttggaaccattcactgtggtcatcatggaagagccccgaaaaagaaaggattaaaaccgatatataaatgccaaaatggagggcggaatggccatctgaatgtgaaaacgagagattgaaaatgagcgtgatatatggattggtccgggaattgattatcggcgagatgatcgcggcacaacccctttttccttgtggcacactggtcttaaccacttgcgagttagcgtcgcttggctccaatataattcgttctgattcctccttatgcagcgcacagtggattgtgtggggggttgtataccgcctacctaccgcctaccatagatgcactgcagaatacagaagaatggtctatctcatgattattggccagtgaaaggtatgtatagaaaggttgataaatcataccgtccgaatccgtcccctttccaatattgaccacgaattgatagcagacatgctattttaagaccggcagtaccggcagaatccacgagtgtcagacccctgcgagaagccccactggacgatgatcagtcacgtgagagggggctaaaggtgccaggccaaccaaaaaggggaagacaaagctgttatggcgacagaaagtgtgtggagaaaataaggctgggagatacttggtgatcggtttctagtgggcgtgggatgcaataatccccgcagagattgacgtagcgcgctgataaccttccaaggtgggaatagtagacccatacgaggcgttacgattacgagtggaaaaggggctcagccttccaaggctgtccttgggtcatgtatgatgatatataactggtcatcggaaacaccgtcaagagggatggtccgtttggttccgcatatcttcttaacatgggtgcttttcccaaagccagcagcagcagaagagataataattttgccaagcaattaaaacactgcccgcgtgttggtgggcttggcatttaatcaggattttgttgatatatcatttttcacttagggctcaagggacctactaactatggtatagtgtatctactgaccatgagaatgcaattggtacatatccatggatgtgttctaatcaatctttgatttgttcctgaacacccaccaaggctctcctttcaacgattaatctttagcgagggaaacatcgatgtatcatgttgcaagtttagctatctaggctaagcacggtaacaaagcgaacactcaattcattccagcgaagatataagcgtggaagatatcagcactgtacgcggtcatgggatgtatcgaaacatcaaaatcaggttggaataacctccgatctgtatcctgcaattcgaatgcgcgttcgcaatggcagcaagcacactcaacagtacaatgtccccatcctttcatccgatcggaatctgggggatgttcgcagcatttgcattgtctgccactgcaaccgcctcgtttagcacaatcctgacgtagccatttacttcgcagatgccacccggctttttctcgtgaagatagatatgcatctttggcgaatcctagtctgcctctagactcggcgacatacatatttctttcaaggcgccaatattctttgtctagacggaccagttcgtcggtcaacttgtgtagctgcttttagtcgtctgccattgatttaacctgaactttttggatctcttccttcaagaatgactcgcgctgggtagttgcgcatagctgcatttccgtttcgatggcagattgcgcccaaccatacgctttatcgacgtgccaatccaagttgtgacaccgtcgacgaatcttttgagaaagtctccacacaccagatctccctattggcttttccacatggaaagccaacttctgagcttgctcgggggacatcatcgtgccttatcatattttcgagaagaccaataagacctacagcagttattaggtaggtcagacatttacatcatgcatcatcatagacctcgataccaagcccatcttaggaactaatctggggagaaccctgaatttaagtgcagtcgggaaacctacctgatctagtccgtattgtcttttatatcgccgtaactggtgattcggtcaattttgcgcctggcccatgctccatcggattcgcatccacttaacatgtggacttttaagtggatccccgttttatatttgagaatcgaatgctctcgctcgtggggtagattccgaccggtaaacccagtcgctcaacgcggtcccactaggtctcgctatgtttggaggggcgattcatttgccaatgtagaaagccttagcggagcaaagttatagtcaactggtgggtgaagaaagaagaaagagaaatatagaattggatttacttcaagtaggcacgccagtgcaccatatccgattgtctactagggtatagctatagacacaagaatgtagtcggtcacttaggctcgtctttgtagtcttttagtatttttatcttttcagacgtctctttagatatcttctctattttgattccctggactcactgttcgcaggcgcttatctatatatggctcttttcgttgcctttgtctaatacttgggagatacttacgctgcgagttcccgcatctgtccaaccaaatcgaccacagtctccttaaagggccgatatttcacccccaactcccgagctgcagtctccgcatcaaacccataagaggcactcgacttctcacccgtcttgtaattcgtagtcacaacatccttcgcccactcgaattcatcgcgaatgatatccgcagcatattcatacgagaacgtctccggcgaagcagccacaaaccgcttcccaccagcttcgggcgtaagcaaagcctgaacatgcacctcagcgagatcgcgaacatcaatccaaccgggccgcgtttcaggaagtggatctgcaccagcggccacactccagagcaccgtatttgattcgttgagctgctgcaccgtcgacatggggtgcacgactggaccgaaaaccatgggaggacagagcgtcaccaggtcgaactttgttttttggtacttgacaaactcccacgctgcgagctcggcgaacttcttcgacccacggtatgcagttacagcagtggatttcggatcgatggcctcctcgtaagtcagagggttccagttcacggctgtatatgtgaatcctggtgcgggagtgctgctcgggttgatcactgcggagacggaggatgtcaagacaaggcgctggacttttgatcctggcttggcggaggccgaaagaatcgacttgactccgttgatagcgggtagaatcaattcctgctcgttgttgatggtgtcgtagaataagggctgtggaacttattagttctttgtattgatcagaagcagaattattgcgagttgcctacgcttgctacatggatgaccgcgtcgatatcatccattacagaatcgaagaccccaatctgggtgaagtcttccacgatgacgaaatcaagctttgaagcgtactgcggacgtgcagctttcatctgatcccccttttgcttggatcttgtcgagcctcggactgagaatccgcgagccagtagattgtcgacaacatgggcgccgatgaaccctgtggcgccagtgacgaggatgtatctgtgatcatgagcactgatcagtagttaggaacagaccgacatacgagggcttttgagaagacattcttataggatgtaggtgtagttaaaggtaaaatgaatatcgacaagtgtcttctgggaatgactttactgtagtatgcagtgcaccccgcgtggggggaaataagatctcaagatcgatatccacagcaattccacattgctgttagtgtgggggggaaccagataaggctggaaatatagtctaggctgaacagagaagcgtattttgttgttctaattcgttggttatatggtctagatatgcgtctataggggacatcatctatatctactacatcatcacttccaactctccttcagcacctcctccgttgtacggacgataatatcataggcattacggacatacctctgttcagccagagcgtttccactaatcacccgtataacacagacgccatcaacgactgtagaggtgatgaagattttaccttccgcgttgaccaactcggagactttcttagtcagattgtcagcaacttcatctttggccacgcgaccaggcgattcactagccccgctaggattcttgacacggaagacagtcaagccaaaggctggcttcgtgacaatctcaaatatatcagaccgaccgcgcacccagccagcaaaaaggtcaccaaacccgatggtcttgcggatgtgcgatttcatgccgttgagaccatagctccgaatcacgaaccaaatcttcaatgcgcggaatctgcgaccgagagaaatagaccagttccggtagtcaattacggttcccatatccgagtacgggttgcgcagatatgctggtgtgacatccaaggcgttcgtcagatccaagcgattccggacaaagaggacgctaggaatgttagaccaaaagtgcaaatttacccacagacacttggaggaaaagcttacctagcatcaaagttgactagcagccacttgtgcatgttcgtgttgaagctgtcaacaccctccgcaaagtccttcgcaatgtacttccactcatccgcaacgagcgccgcaccggcataggcggcatcaatatgcacccagatacgctgccacgccggcttttcttgtagaactgccttgatctctgcaaagtggtccacactgcaggtatttgttgtgccaagggtcatagtgaggtggtacgggacaagtccgtccttatcacacttctcaagaagctcacggagacgaggtccagtcatttccatgttatcctccagccgcgtggacacgctgcggaagcgagtgcccgcaatcaaagcacccttagcagcgctgctgtgggtttgatcactggcaatggcgaccagcttagcttggacatcgaatttacggtcctcgtactctggtgtaccctccttcaggccctctgcaagaacaagctctcgcacacgtctctcccgtgcggcaacaataatagtcgcaatagcatcactcgcactgttttggatcacaccgccgccgtgggtctccgatgtacttctaaaacactggggtagtgccagagctttcgcgacccaatccatgacaattgtctccatctccgtacatgctggcgagcacaaccagttgaacgcaggggcggtgaatgtggcggagtacatctcacccagaatgctggggtatgtcacgcaggcggggaagtatgccatgaaattgggagactgccaatgggtcaatccgggtttgatctttgtatcaacatctttctggatttgtgcccagtcctctggctcgtccggagggttctctgggatcagagggcgaagatatcccggctcgacggcgggcaggactcggagctcaggtacgctgtcgaagtatttgatgactgcacaaaagctcggttagatttaacattatcgagcccgaaggttgcacaaagttaggacggctcgtactatcatcaatggcagagtgtgctgcggccttgaactgatcatgatccatgctgcacgtcaactagatctgcgacgcggggtatctagagctcaaaatgcggcaattggcggcacagtagaacacagtacggggagaaagatatagaatgaaagtacaagtagaatatgtgatattgaggccacagcgaatgttccaaggcaaatgtgggaaaagcaaacatggaagaaaaggcgcggggaggcctggaattaattccgtcggaagtttccttccgtgttccgagagctcggaatattccgcctttccaaggagtatatatgccataattccaaatccactctcatagctcaatcttcctcttccttgggatcataaatgtcgcccgcaggtgtcttctctagcctctttccatcctcagtcacaatctccttgctagggataaccaccacaaaaacccgagcaacatccttgcctcgatttacccattcgtggtttgcaccgcggcagacaatgacatcgtgttgatttaggatcttctcttcgcctccgtctgtgataaatccgacggtacctgacagcaccacagcgtaatccaagctcagtgtccgatggaaccagcctgcgtctgccgggggtagatcaaggacgcgacaggaaggacccttggtgtcagccagtgggacgagggttttatgcggatcagagagctcgcgcatattgtccactggaaagccgcgcgaccggtgaatttggataaccccgaacccagagtcaggccccggggttgagaatgccggagcagatgtgggatcgtatggcgtcagaatttcgtcggaagcgaaatacgcctttccctgagcatcgtggcctgcgataacgcgacggattggggcgtccatggtaagagaaagaaatctctgggatgagtaatgggcaagagggattgggatagtctttgaagcgggaggcgaatatggcagttgaaaaagaaagcaagtgtcagtgggcttatataccttatggactgagtaaatagctgattaattaatggaatacagatgaacattaccaagcacttccacgatgttgatcgtcattcataggtttggtatgcgctgcttcgatttataatcatgggattgataagatgggggccgaaaatatatgaggctgcaaggagagagcctccagttcgactgctggcagaagaatctgaatctaggtagcgtgcatagtgtttcgagaaaaaaaaattcgctgttgtttacctgggctcatgtggagtttccctgatcgccttcctcgtcgtccggtttgtcaaatccttcatcatatacctcctctttcagctccttcccttggacactcaacttctccattggtagatacacaaataacatgcgacaccatttggtatcactccggtttcggaatgaatgtgcagtacccctttggatgctcacatcgccacgatgcaaatgtcgactcgaacctgagtccagtatgagatcaacatccccctcaattatcacaccatagtcgacgctcactgtccgatgcatcggcgttgcctttcccggacggaggtcaatcagacggaaaacagttccgttatcgactgtgactccaggaggttgatgtaagaactcgtcgtacatggcgatgtccgcctcagcgtcaaccgaggctggcatgctggtagtagcgtacagcaaagcaatctcgccatcttccccagttggtgtcgacgggaggtagtcggggacttgcgcatgggaaagaaatattgattcgccgtcgttactgtgggtggtgatgtagcggcggatatagggaagcgggtttttctcgtaaggggacataatgagctgatagagatggtatctgaggaagaaaaaagtgatatcaggtcagcgactcatcaaaagtcgcgagccttaagttggaaatatacccttgacgaaatgctgtcacatcatggtggcatcattttataaatcaatgcccaagtaggcttaagcataattctgttccaaggttgagcaaaaatcaatctaaagtctgcttattccctcgagcactttcttgacaattattcttaattcactatcttattaatataggagattgatgttatattgccccccccccnnnnnnnnnnnnnnnnnnnnnnnnnnnnnnnnnnnnnnnnnnnnnnnnnnnnnnnnnnnnnnnnnnnnnnnnnnnnnnnnnnnnnnnnnnnnnnnnnnnnnnnnnnnnnnnnnnnnnnnnnnnnnnnnnnnnnnnnnnnnnnnnnnnnnnnnnnnnnnnnnnnnnnnnnnnnnnnnnnnnnnnnnnnnnnnnnnnnnnnnnnnnnnnnnnnnnnnnnnnnnnnnnnnnnnnnnnnnnnnnnnnnnnnnnnnnnnnnnnnnnnnnnnnnnnnnnnnnnnnnnnnnnnnnnnnnnnnnnnnnnnnnnnnnnnnnnnnnnnnnnnnnnnnnnnnnnnnccccccccacctgcctgattatgccttattctgcttgattcctttcgcaatctcctagttatatataagacaatgctttcatttaaccccatcttcggtaaaggtcgcaaaggtctgctagttctgtatacatgaggagtctcatttatagcacgcgaccatgcatcaataattaaatgtaagaaagcctggatctgaaggttatattctgttaaaacatgccctgtagtaaaagatatgatcatttccactaagcaccgaattatgccttgttgacaagcacacgtaacatcttcattaagcagatttatcgttatcgtcatcatcatcatccttctcattcaaactccaccgtaaaaggatcggtcgattcttcagcaaagcacaaataatattcacgttgctcttccgagttctcttcccatgggatgaggagcttcctaaggcctgcgtgcactagcttttgaaaatcttcggggtccatatacgtccttatcaaaatcacttgatagtagctgaccggcaggagctcggcgcaggcgtcagaaatttgctggccagcctcctcaagcttttcagcccagaatattgcgtcctcaagatcagattgtcgcttgctggtcccgttttcgtcttcctgccgaagatatgaacacctcactttggctgctagcgcataatccggctttaggaaacggatgccctggatggattcaaaggcctcggcttgcttaacctcgtcatatgagaacgtttcgacaacggtggtcagaatatcaattggaaccgattcatgatgtaactttccctccaccaacttgaagccgccgaaatttttgagatcgtgtaggattgctggatcgcggatcagaatgtcgacatcttgtgtgactcggtcgtggccttgcatgttggcggcagcgccgcctacgagaataaagcttgtgggaatgacatcacgcaaagcgttgacgcacgcagtaatattcgctgagtcggtggccatagcaactgaatattgattagcagaggttcaagtagagaaatcacgctccacagggccaaacctgatatggcgaagaaacggtgttgcgataagaggacagaagaggatgttacgcgccgggtctttatgaaaaagagtgcattctaagtagagtattgaaaatgaggggggaaggaaaggaaaggaataggaatcaggactattgtgggcttttgtacctttgcaaaccagggaaatctcgtatgctcacttacggtttaggaaggaatgacttccaccaagaaggaaggaaccaacgagcctagatcgtaacagagggaagaagaagaggacagaagaagagggcagaagaagaagagggagaagaagaagagggagaagaggaaatgcggggtgaatacgagtgacctcgacggcctaaggcctccagataatcgttgcagagcaaagcgactgattccaacttctaatgctacgcaaagcccctctcttactggcttattctccccctgcctgtaatctcaatactgcttttacaattgggcatattccctgccatatggtagtatgtagtaaggcagtaggtacctttaatttgtatgcaaactactaataaaattaagtcccttttatcatatcaatattattaactgcttcatcaactgctttatcgttaactactttagcgactacttaagcaactgcttgaacaaccgctagcacaaccacttgagaaactgcttgagaaactgctttattagttagttagttagttagtacggtgtagttaactaacttctttaactacaacatagtaactattgcagtggggtttccagggcaggatgactaagcggctatgtgacataaaagcactcccgaggcataactagatagcaacgcagacacctttccacttccattctcagtagtcaccccatggtattctcctctctagcaccctaccactcccagtgatgactctgctctcacacctcttccgcaggcagggctgtcggtgcccctatcctagggatccctcttcactatgtagcacggaataaagtatcgtctagccagattaggcctagtctatatttattctgccggtcggattattctgccaaagttagccgatgggatttcaccgcattaattccataggataaaacaacagtcacgtgatatgcacacgaggttacgatttaactgcttcgcttcgctccgatatatgccacataaaatattcaacgccaaagtaggtgattgcataaggaggaactggcaacccgtggactaagcccaaccctattccaggattggagtcggcaatcacgtcatccgacatgtaacggtcacatgaccgaagtgcacctgtagattagttgagatactctcagtccatcggttagcatcaatccaactgtatttgctgcatccttcctgcctcctccgctggcaaaccccaacgagctcaaaagctctccacaatccggtttccaatatattccgcacccgatatgacaaatggctgattacgtcgccgatcgacctcttcaagaaacctcctcatggcccctttatcacgtatcggaatctctcgaggagcacggaatcagacactgtatcaccggcgatgctattattgggattctcggctatcccttagtcatttgcgaattttatcttgcggttgcagacgaacaacttgaagatgcccgctctgtcgttcttcagcaaggattccaagcatccccagtccgcgatatatatgtggataaggatgctagggtttcccctctaggctggccaggatacagactagtgatgccttgcgcatccgtcttcccgggggttatgcttgttcccgcgagcttctggcatatggatctctcagaatcgagtctatcgacgaacacattcctacatgattctacacgatgccgatttccaaagcggctattttatttggatggtaagcatcatagcatgattgcctctttcaactttgtcttggcttcagtctttgtttgtcctgttcgtgtactgatcttctcttaaattcctagctctgatcgatgttattgtcgaaaacgcattgaacccgggcggcaaccaacgcatatcgaggtattttaaaatgcagtatcactatctagtcggctgcatccctccggatattcttctcagtctgccgccggaggacaaattctttgtggacttatatggtaaaccgcttccaccaaaaacccggaaaagagtctccttaaatcggcagcggattcgacagggtctgatgaatgttgaagaggcatggaagtcaatccccaaaaaagctctacggtttgaagagatagagataaaccgtaaagctctgaattcgcggtaatttatgtctcatttcctaatttagggaatttcaatttagcctatatttaattggctgttgttaattcctcttagattaagagaataactagagatgtgggcttctttctatatagcctgattgtccctttgccctttcttagtcttttattgccttatgaatatagcatatctcttaagattgctagcaccgaatcgcccaacatgccttctagtgtcaagggtggtaactaggagcccggtgcgccacagacaccgcgccctactcaggatgacctcacaatcgccagcaggatattaccccagatgacgggacccagtaagtactccttccagatacatttagttcaatgactaatgataacccaagctgcccgccagaggaacccggccaacacaatgttggagccccctgaaaatccctgttgagcaggccgacggtgcagatcttggtcactaatatacgggcaattatagatctacctctcccagcaagtgtattacttgtaaaaatagctaggctgcaagtcagcaatatgaggtgtttatccactgaccatttgctgctagtaacgtggggcggatggaactcagctctcttataagtgaaggttcgtgtactcaatagtatattctttgttctcaccacactttctagacaaaccagtacgcactatgaatccgagcccctaaaagcatttcagaaagcaagaaatctcaaactctgttcaaatcgtgtatgggatcgaccgcgccgagtacggacacggtgccgcgttctatgagcccttcgctattttctacccaaatttgtcgttcaaatgttttgctgcccatccgacaccatctcgcccttcatgctactggcaaatttctcaatgcactcatcaagactaggaccacccccaaaactgtcagagtccctcttagcagcaactgcttccttccagagaccgttcatcctctccccacccaagtgcatcagctaattgacgaacaccgtcgtcgcaactcccgaggatgcacacatcctcgtttcgatcacctagatctcctgctttttcattgttgatcaaaacccgaggaaccccctcttccactttcgttggcagagtagagcaaggtggtacacgtaaactagttcccataacaagcatcaagtccgcctcgcggacctttctctcctcctcctcaaacccagtcaaatattgcccaaagaatacaatatctggctgaaccggaccgttacacctataacaacggggtatttcaccagcgagaatcgctttgtccacgagatcgtcgaaatatggtggcttcttgcacctaatgcaatgttgactcttccagtttccatgagcccagtaaatcttgtgaggaacccctgcatcttcctcaagctcatcgaaattctgagtgataacaagatgaagcagattctttctcgctagcagtgccaggaacacatggctgacagtcggtttgaaatttcccgggtgaagtgcccgggccaatgtgtagaatagctgaggctttgcccagagataccgagcatcaaatatcgcctctttgcaagggagttgcagtggagcgagcttatcataaaggcctgtgtttggagttctgaaatctgggatccctcnnnnnnnnnnnnnnnnnnnnnnnnnnnnnnnnnnnnnnnnnnnnnnnnnnnnnnnnnnnnnnnnnnnnnnnnnnnnnnnnnnnnnnnnnnnnnnnnnnnnnnnnnnnnnnnnnnnnnnnnnnnnnnnnnnnnnnnnnnnnnnnnnnnnnnnnnnnnnnnnnnnnnnnnnnnnnnnnnnnnnnnnnnnnnnnnnnnnnnnnnnnnnnnnnnnnnnnnnnnnnnnnnnnnnnnnnnnnnnnnnnnnnnnnnnnnnnnnnnnnnnnnnnnnnnnnnnnnnnnnnnnnnnnnnnnnnnnnnnnnnnnnnnnnnnnnnnnnnnnnnnnnnnnnnnnnnnnnnnnnnnnnnnnnnnnnnnnnnnnnnnnnnnnnnnnnnnnnnnnnnnnnnnnnnnnnnnnnnnnnnnnnnnnnnnnnnnnnnnnnnnnnnnnnnnnnnnnnnnnnnnnnnnnnnnnnnnnnnnnnnnnnnnnnnnnnnnnnnnnnnnnnnnnnnnnnnnnnnnnnnnnnnnnnnnnnnnnnnnnnnnnnnnnnnnnnnnnnnnnnnnnnnnnnnnnnnnnnnnnnnnnnnnnnnnnnnnnnnnnnnnnnnnnnnnnnnnnnnnnnnnnnnnnnnnnnnnnnnnnnnnnnnnnnnnnnnnnnnntctgggaccccggcgctggtactgataccagcgccaaccaagacgacaatctgtgtggcttttccagtctggataaggtcgacgattgattgaatgtcaggtttcatactggcctctgtatgatgggtggtttcgtcagacatatcttcgagtttggctatttttgtggatgatggttggaagtaaatgagtgttttggttttggagcgtcaaagaagcatcaaagcagatggctttggatggaaaagaaagctatgggttttattgtgttagctggctaggagagagagaagaaggaagatcaaagaaggtagaaatagggagcaggtgctaccaatctagggcagaaacggtctgggcaggtttctatctgcagtaggcttctgtaaatcatacatgtcatgtgttcattatccaatcagcctgatggaagagattatctcttattattcgctgggcaaagtaacatttgtcaactcagtgagcaagtctgtccagtctggtgcattgagctcaacattagcgctgttctctagcatctccgtccatatgtcttcgagaggcaacggactaagcaatgcatcttgtgaagggtacattgtcgattgaacgttgggtatttctggagggaatgtgatgctcttggaacccaatgaaacaggcgtggggatatccggctgcgaggcgttggctgttgtgagatttggattcgaagatgcagaaagctcctgtaagtcgcgagagcttactcttctttcgtgtttccaatgcctccgcaagatctccatcatggctttgattccttcacgtgctattggagagtattgttgtgcccgactgagcattcgacaagcgtcgagtacctcctcttttcgtttctctgccagaatatcatcccagttgaaacaaacatctatcagaagaatggcagctgccataaaaacgtggtgcatgactgcccatataatcgagctgtgcggtgtgaacacaggctcttcctcatccataatgcgtttcagttcgagcaccttgcgcgcagactgaagcgatacgatatgcgaataggaatatttggagtcctttgctccacgcacaaagtagtggcgatgcaagcggcagagccgcgaatgatagccctgttgtaccagcgctcgctgccatgcaagagttggtcgttcacgatagaccaccgaaaattcacgttgggatgcttgatcgtagcgaaagaaaccaggaatctcagcgcgtaccttgtgaagcttttgatctagctcaagtatcttctcgtagggtgcctcttgcccatggaaatggtagtatgacgtttcatccactatttgacgacacacaacagccaacttcaatcgacatagactgtatgacattgcggtcggagtagatagaggaacaccgtgttcgctatggtcgatttcctcatcctcaatattgagaggctcatttacaaccatatgcttaggttggatcgagtacgtccattcttggggtccactcaagaagcctattaaccttcagatatcatcagtcatagtaccggcaaggtctttgttaagaacgtaccagtcgtatgttgccaagtcccaccacagccgtcgtttgagttcaacattcgttttatcaaatccatttgctaagcgttcggtaacaacccgaggacagtccacaatatgaagccccatactagtggcttgactcacaaatgacctatgcacaaataacggactgacggaggagggcaagttcatgttggacagatgatggccaatgatcatagtcgcttgcagtccttcgaggctgggataagggatataattgctctggatcaatgcagcgcctgccaaaaatgtactgtcctgactgaattgttctgcgtgctcggatgactctatcaggagttggtaatacagggcagcagcagtgatactgaacagtagagcagtgtgcgccaagttgatagactcatttcgctcaacacgctcgtaaatcgtctcaatttgtcgttccacgcgactggggatgatgacatgatactggaagtcaaggtatttacaataataccgaaatagactcagcgcttctgccagtggtggcaaatacgactgcagatgaattgtcgccggattctcgcgagaggcgagtcgttcacacatcggaggcaatcgatcaccaggtgtgctgttttgctgggaaggcgagcgttcgggttcccgctgggagatctccgccctcagtgtagcagggactgcactagggatacggtgtcccataacaattgtctcaagccaatcggctgtcaaaaggggctcatttccattgcgactttgtgtctccgtgtcctgtcgtggagtccactgcaaggtccgaggtggctcagatacgcgatcgtccaacatgggcctccgatctgtttggctcatgggtcgcacaggggttgtccccgaggcgtagctgccatagctgcactccagtttacgcgaagaacagctactacagggaagctctctgtcgcacttcagcttcttctttcgacaggactcgcaggaaacggggtcttgtcgagactgtcttttcgggcctggggtgacgactccagaaacttgtcttcgtttcatgttttcaatctccccgaaaacagtttaataatagtgacccagcgaaagcaaagaaacagcgcgtttttcgcataggagacagcttgaagtgttggcccggagactccgcggattctccgagacgctaaaccatatctgtcaattcttcctccggggcatctagacagtagcccggagactccgagagtgattttcagatgtaattaaggagtcagatttcttataaaggtcatggtattccgtagtcatcttgcttttaactagagccatttcatttctgccaaaatgtcaccaaaggatagtcctccaactgaatacacgtaagtgaaatatacttcaagctacaagatatgtagccgaccagtgcactaacctcttctaggccccgagcatggctagttatattaggcgccttcacttgtaccttttgcaccgtggggtttatgaactcgttcggtatcttccaagagtactacacaaaaaaccagctatcctcaacctcgacatctaccatcgcatggatcggagctgtgtcaatattctttttgtttgctatatctgtcgtggcgggagcaatgcttgatatctttggaccaacggtaagcatactcttcctgaatcgtcgagaaataaaactcatacttcctttgaacagttcatggtatatgttggttcattcgggtgtgtttttgcaattatgatgacttcactatgccaggagttctatcaattcctcctcgctcagggtattctgttaggtgtctccatggctatggtgacatggccgatgctcgcactggtcggacaatatataaaagtgaagcgtgctgccgcgatggggattgtgcttgcgggttcatcgctcggcggagttatctggcccgttgcaatcgacagactgatcaataagcccaagattgggtttccctggaccatgcgaatcgtcggatttatcatgattccttgctttatcttctcttgtgcagtcgccaaatctccgaatacgcctgcaatcaatttggagagtcgtgattcaaaccagaaaagtgacgaagataccgcggagcaaaaggataagccgcagagtcacaaggcagaagcgatggccctttttcgaaaaccgtcgctgcagctactgtgcctcgccatgttcattacatactttggcatgttctcgccgtttttctacacgacttcctacgcggttgagaaaggattctcgacatctctggcattctatactgtttccattgtgaatggggcttcattcttcggtcgagtcctccctggcatcgttgccgacaagtacggaaaattcaactgttgcatcatagcaactatatccgcaggggttgttgcattgtgctggactaaagtcacatctgtggccggtctggtaatttggtccgctgcctatggctttgcgtctggagtgagttatcctcgaatggtataaacttcgaatgctgactagatttgtagggcattttatccctccagcaagcttgtgccgcccaggttgctacttctaccactcttggcttggcaattgggactgtgtcgggtgccacagctctatcgtatgacccccatatcttgaaatgataatgtagtatgctgactggaactgcagcgctatggcaaatgtgcccatcagtggtgctctgctcgagaagtacgggtacctttccctgtcaatattttcaggggtatccttgctactaggtggcttgcttttgattgctgcacgtctagtacagaacagagagcttcgagctatcgtgtaatgcttggccattgggttgaatttgaaaaagtgagaggtgaagctgatagaagatgggaagatcgatcaaagtccaaagacgattgatggatactgatagaagaggatttgacggaaaatcgtgcagcatattttccactagactataacaaaaaccaatgttcctgtttaaggcttaaatgagccataactatcacattctgataagatttatcgaaaaacaaaaaacaaaaaagaatggtcccagagggggtcgaaccctcgacatctgcgttattagcacagcgctctaaccaactgagctatggaaccgcttgatgtatgtagcatcaatttgtggttatataaagtgagtaggacgatagagcagggacaaggccacttatagaaagagtacctacagttcgtatgtatgtaaactcttagcagaattaagtcactccttccctatcttgtaccaactgtcacagagatatggcagaattctgagtggtaccaaattagaaaggcggtacaggcagggatgtgcaagtaacaactccctaaatatatattccgtacagataccagaagtatgttccaaaatttgcaagaagttccaatatttcaaataattatgacgctcgggacaatactatcccgaacgatgaaacggaccgacgacctgcgtcaatatactagactaggctaacatctggggtcgaatattcccgtgtatgtacgcatacatagattgtcctacctcctgtaagaaccaagagtctcgccgaggctattggataacggcgatttcgttcacttcctttgtggccaggcatcatacagtccttcaaagaccgtcacatcttcgaatgtcgcttctcccacgccgttatggaagaagttaattttagtcgagttggcgtaccaagaccttcatgcggttagtttttgaccaatcttccataaacaagagagacttaccgagcccaagtgcctagagcaaagcgtccattggcatatacttccagtacactattatccaccacgatagtgagctccaaagtttcaacctgttcttttccatttcgcaacacgtcgaagaggcgcagacgtcccgcctcgttatcactgaggatcccagcagttgttctcgccgcagcactnnnnnnnnnnnnnnnnnnnnnnnnnnnnnnnnnnnnnnnnnnnnnnnnnnnnnnnnnnnnnnnnnnnnnnnnnnnnnnnnnnnnnnnnnnnnnnnnnnnnnnnnnnnnnnnnnnnnnnnnnnnnnnnnnnnnnnnnnnnnnnnnnnnnnnnnnnnnnnnnnnnnnnnnnnnnnnnnnnnnnnnnnnnnnnnnnnnnnnnnnnnnnnnnnnnnnnnnnnnnnnnnnnnnnnnnnnnnnnnnnnnnnnnnnnnnnnnnnnnnnnnnnnnnnnnnnnnnnnnnnnnnnnnnnnnnnnnnnnnnnnnnnnnnnnnnnnnnnnnnnnnnnnnnnnnnnnnnnnnnnnnnnnnnnnnnnnnnnnnnnnnnnnnnnnnnnnnnnnnnnnnnnnnnnnnnnnnnnnnnnnnnnnnnnnnnnnnnnnnnnnnnnnnnnnnnnnnnnnnnnnnnnnnnnnnnnnnnnnnnnnnnnnnnnnnnnnnnnnnnnnnnnnnnnnnnnnnnnnnnnnnnnnnnnnnnnnnnnnnnnnnnnnnnnnnnnnnnnnnnnnnnnnnnnnnnnnnnnnnnnnnnnnnnnnnnnnnnnnnnnnnnnnnnnnnnnnnnnnnnnnnnnnnnnnnnnnnnnnnnnnnnnnnnnnnnnnnnnnnnnnnnnnnnnnnnnnnnnnnnnnnnnnnnnnnnnnnnnnnnnnnnnnnnnnnntcctccccgccgccgcttgggtggggggggggtcgacgatgatggactcgttggagaattggtagtagatagttgtagactcaagactagaggataaaacctggaaaccagcctggatgccagagtcacgggcagaggtcgggaaagatatatttgctgtcagcacgaagaacttgcttgagggtgaggtattgaagggcactgctccagcattcgacaacgttttaccagactcgacaaaagatgagccggatgtgagagcgctgtaagtctccctggaaattgagattcccattgtttcaaggtcgatctgaccagagtcttcgcgggccacgcgccacgatgtcaaggactcacgcgaaagttcgttatccaccacgttagagatagtgcggacattcagctctcgcggcagtaagagggccccggtccagttttgttgagcggtagggaatcctttcacttgctcgaatagatctccagtgagccagacataggaaatgaaccgatcgggggcaccgctctttgtggatgcctgagagctggccggcaagatcttgcctgcagcagcatatgccgacacgccccagtcaagcacacccgccatggttggcttgaaagtgacagagccgtcatttgtgacattgccggtcacccacagcatatcgcgaatagaggagacttgaggaacgatgggaagtcccgaaccctcagcaccgagggttatgaatatctcgccgtcttcactatacccctctgcattcagactaaagacgttgccaacctcaaagttgaagccccaacccccggcccagtcaccctttccccaagtggtattaaggggctccttccaccattgcccgagatattcccaatattgaaaatctgcgtcgttctgacggtagaggaactgacaaggtccgacaccgtggacaccgccagatatggcgacataccatgttccttgggtactattgacagatttgtccagaattgggctttggaaaacgtaggggtcacggaaagcggtgacattgagagcaaacggaggcgtagggatcacgggcccttggttgagcttggtgaagttgtgaccaccgtcataggaaacggccaaggattgtgtctcgcttccccgggtgtaggggatggaccagtggattgggaggtatgatacagaggtatacagaagagttggcatgccgtctataccgcttggaatgaccgagccatcgaagacagaaagagggtcgttctttcctcctgcaacaattgacggggctccatcgggattgaggtctttataggtaacgagatcgtcggttgtcgctcccgaaatcccactgtaaagccaacccacgtggaagagaccagtcttgggatcggtatagtgcccgcacgggtcgcctatgttcccagatggagggagaagatgggctctgggtctccatgtcttgaaaagagatgcgtttgccagggtagaaaggtttggcggagccgagttatagtcaatcggggtatggaaatcaacagccaatgcccggtttgctaaacccacggtgattgcatttgatagcttcatagtgtagatcttgggtagctgttgaacttccggatatacacacctttatatgtctaatcttgccatgataaattgaccgaggtgggatgaagacaggagccaatagaaataggatctccttcaatatggatcttcttgtgacgttcatttcctctttggatggagtcggcagtttccgcaagtcaacggtaaaaccgcggggaaaccccggatgacaatttccccgatgcaaaaaaacacagggtctatgattttagttctagggaatagacaaaggcaatagccatggccgggtgctcccaggtgaagtattgtcgggaatccctgtcgtacccaaattggttgacggaaggccgcttgagaatcgttcgatgcctgatgtgtgccggtctggtgaatgaccagagcttgtggattctcacttgcaatgggttcggtggttggaaaactgggaggatctacaatgcctcggcaggcgtggcgtatcaatcacgacgtaatatggagattttccccttcaacccttgcatcaagaaagaagggtccacgaggatcgccgaatgaataagagcgccccgctcactcacactaagggcttacggcaaattgtgaacatatttgcgagcctggaagagactcgaaatttcaggtagatgaaagtagagccaaagcttggacacgactcacagctaagcataacctcaagccatgaaagactggtatcattttgttgaaagatccgtatatacattcaatcataagaaaaaccaagaacctagatcttctccgaagagtacaaacgaacaggcacgccataatcatgcgacatcgtaagattagatagtttgacaggctcctgtcgaggatgggggtccgcgttttcgagggtatcgaagtgctgcatcaaacgaacgacggtatagcttgcctcagtgagagcgtattgttctgaaagattgattgttagccactcattcaaggccatcttcgattttgtttctccggggaaagagaacatgcacaacttacgaccaaggcagatacgcggcccaccattgaaaggcaggtattcccagccatgcttagcattttcttcccatcgctcgggccggaaggaggccgcatccttaccccatagatccgtccgacggtgcatagcgtagacactgtaggcaaccatcgtgcccttcttgatataaaccggggattggtggtccgtaccaccgccgaccggtagggaggtgtcttttgtcgcaatgcggaagttgagaggcacaggaggctggagacgaaggactgggttggagttagtcggatatccattgatagtacacagcatatactgcatcaactcaccttcattcaacacatatcgcagataaggaatatccttcagcttcgtctgagtcatttccgaccgtggattctttgcgtctccgaaaatgtccacgatctcatgacgcagccggttccacacattggtgtgacgggaaagatagaagaaggtcgagctcagcagactagctgtagtatcgcgaccagccaatagaatattgagcatgttatcgcgtagaattttagggtcatccgtctcagcgaccaatgcttcgaggaagatataccgaccgtcagcatttcccttttctgagttccgtttcgactctagagcgagattaacatagtgatcgacaacttcgtgcacctggcgatttgcctcgcggaattccttgggattaacaacccaataaattccctgggcgcgactccgcgcagcgagataatcctgcgcggtcccgaaggcgttggcgaaaccctgcgcgctaccgacggcgcatttttccagcacgcctgtcttcccagaaggggggagcatgcaccccacggattccccgaacaggaagtgcgttgccgagtccagggtcagcaggaaaaacaaacgctggatgtcgaaactgcttctatccttggggatcaggtcgatcaggttggagatgtggtcgtccaacatggaaagatcggcgacctgtcacctcggtcaatcacatgtgcataaattctccgacaaagttttagttacctggtccctggtgaactgcgggcgcaacaatccccgcgcatgcgaccacccggcaccatcgagggtgaagatgccatcgcctagcagtgggtagaattgttgatgtcttgttccgagagagaaatctttgaattgggtcgcgagaattgctttgacattttcaggctcgatggtggtcatgatattctgagacaggaatgtctgtctgtaggtatttccatagacagcatattcgtcacagagatactcgatccagcgcttctcacgaacagccttactcaaccgaagaaagtccggaataccgaagaaagtcgaagagcccgaacgagcaggcttgcaatgcagagccctggattgtttacggtgatgacgtagctgtacgaagtagcgcacaaccaagaaggcagaaagcacggcaaccagggcaaatgtagggaatagcatttcgttaacgtatatgaattggaagaaacagcagtcaaatatgtgaatggaaatctaactcttatgatatgtccatggcctcccacgtgaaaaaagcggagatcgcaagctgattcaaaacgggaatagtgtcgaatggggagagaccgtcgcttgaaccttccagggtttagcaattaccaagccttggcctagaagcatccgagccattctttcaacgccgtgcggaagtatcctcgggaaatcgcccctggcacaaatgtcgtgcggaaatcaaagcagtgttccgcattctgcatgatgtaaccaaagaccgtattttccgccgtctcaacattgcacttggggatttcggtcgtgagagacactccttgcggggctaaccgagtgccggccgcgaggggcgacaaagtgcgccacggatcaaactggccgccgctccagtaaacgttggacggacgaatggtccatccgccagtttccgtgttgatagcgtcgacctgcgggtgtttagggaacagaccctttttgacagcctccgggaatgatcgttcgcagtattcctgcgcataatcgagggtctggtatctggacagcaacgagtgaggcccgaagttgtcggtctggaagaatccccattcggtgcagtactgccatgtccagctgatggtgtctgggtcggtggatggtgcgccaagatcgcatacgagcggatcgctggcttcaagcttcctgcagttggtattcaaattcatgttgaccaactgcgtgaaaggcggccatgacgcatatcgctccgcggcgtacttcttcccccggctgggagcgaatccatgcgggggcgccgctgcgctagtcttcgggtcggtctccatgtgctcgcagaatgaccccagactgcccaaaccaccttccatgccataagactggtaatagtagtagatgatcgtgagcgcggcggtgaaatcgccgttgctgtttttttcggcgccttcaccgaagaattttcgcttgatggccgccgcggacgatttgctcttcgatagttcctcgtcgatgtattcaagtgcagccttgatgtcgctggtgcagttagagtgtccatatgcgaccatgccgtcatacacctggtcgaaatagacgctcatgtcgatccgcgcttccacgggcgcggaggaagcgtaggaagcataaattgtatcggggtacaaatgacgggtgaacgcagctcgcatgccagagtacgagcctccaaccatgacccatggtgttgcgcttggagttaggttcacatcgctgtaattttcgcgagtgaagttggcggcaaagaatgggatgtctgcaagagcctgtttattgttgaggtactggagatgctcaggcctcatgttccggctgacgttgtagggaagagaatccccatagtatctacttggtgttaattgagtccgagctttcactggggagaggatacaaaccggtgttcccagacaataccgattccaccgaaatccctgaccaactgatagaagaacgtggtcgaattgcccagaaaggtttgagccgaggattcggcatttccttcaccaacatcatatatgaagaccggtcctcctgcctggtaatgctcttcggatacccaatagcggttctggtaatcaccaaccgaagagttactgtgatcaatcgggagctacacatcgtcagcattcatctccgtcttcaagaaattggaaagtctcacataccgaaacatattctgcctcaacaaccacatcaagctgggcatttgaaacagcatacaccgaggtcttctgactgagtaggatatccggatagacccccagctcagcggaaagcttcagatcgcgcttgaatgacgatgtgacaattcctgcagctgtaccagacagcgcagccaggactgcagtcccccgaacgatagttgaaaaatgcatattgactgacagtgccttttgagtctctcaaaaactcaaggacacacggatagagaatagctttcgactatctcgggtcccttacagaatatatatgcattatggagataggctacaagcgcggaaatgacaaggcgaatcagaggacattatatgagaacaatatgataagaacaatatggttgcgtttgtcgcaaggccgcagtcatctggaaaaggtggattgcgcattcggggcacccgataggatcagcgacgagtggacaccatcaggcacacccgagacatggccatcgcgtgcggccagtagctgcgtctgtatgacccggggcgagaggtcacggagtctaatttctggggagtttgagttggatgtaacctacttagcacggcataaggtgtatgtctcgaattaattagccatttcccccaattacccctcgttttgattactatcagcacttggcaacgctgtgataactgtgcattgcattagtgatgtagtacctccctgctagctcatgttgactatcacttcccgattcggcagaatgcgatcgtcgacagattcagcgaagaactcctgagacccgtggtgtttatcgaattcgattaattaactttctagtcttagaccgagcaacaaacttccgcatctgggtttatctaaaaacaagcaccacgcgacgtccaaacccccgtcactgggggtggatcccgaaaccaggtctgaaatcggggtcgatcattggccatgggactccgaacaggtcaaccggactccgaacaatatcccgaccttagtattgttgtgtgtgattgtttaattagcatcgccgtctctctaccgattcaattcatgatattgtcttgtctcggcatcttcctagaagcacgtctggaaacggtggttgtggaatgttgatctggaatgtctgcgccagttggaaaagccaattttgcgctcgacgtagaaacaaacatagttcactgtggcttggattgacatggaaggattattccacatgcttttcttcttcacgggactccgggaccaggcccgtccctctactacggctagagtatattatacatcaatatcacatcaatcgaaaggttatacacggaaagtcttacggtttatgctttttgccgttcatagagaagacatctagaaagactacaaaaaatacatgaagtttaggcatactcttgtctatactaattaagactagcggtgagccagttcaagatctactacagtaaaatatgatatagcacactggccagactagtcataatgtgatacaaaggtctcctcggatatacgaaggaagcaagaggaggcatcatggatgttgttattgtatggtgaatcctggtgattatgcggggtagaactacgaggttatagacctacaggtactaaaatatacaagctcatctagttaataacctagttagtaacctctaatttgtaatcatgtaaaccccgatattcgaagaatatttgttccgaatcagagtctaacacatgcttctactaactctgtgtaaggtggcacaattccacccataggcaagaaaggcaaacatacatcgttactctgtaccagacttttaattgatcattcgcaggataattatttgaaatcaagctacacttagagtacactgtggcaagagaaagaaaagaatacacctgtgtgtcccaaaaaggaaagtctgacgaggcctcggcacgccttccacctttatcaagcccctcatcccatcgctttctccaggctgctcggctatggaaatcggactcggcccgatttgcgactatggcctgcagagtgtgacgatttgtaataatggagtatgtcatctttgttacatgaagagcaagtgacctccacgggcactccggcccagtttccaactctgacacctaccagcatataaagccacggcgtcccttccctcacgaaagccacttcttgaataaccaccctattgcaaaggaagtatccaatcatgccgcaaacatctcgcttgcaagacaaagtagccatcgtcaccggatcctcatccggcctaggacgagcgattgctattcgctatgcccaagagggagcaaaagtagtctgcgctgacctgacaccaactgcccgatcccaagaggagtctaatatcacaacgcacgatctcatcgtcagggatggtggtcaggcgaaattcgtgaagacggatgtaggggatgcaaagcagatggagaacttggtccaggtcgctgtgaaagaatatggacgagtggacatgtatgaaatgataatgaaggtcttcgattatccttctgacgatttatttagtctagtcaataatgctgggatcagcattgaggcacgcacgcctgctgtgctacatctgaccgacgagacaacctgggacatgacgatgcgtgttaacactaagtctgtgtttctgggttgcaaatatgctcttagtcaaatgctggctcaagaacctcattcttctggggaccgtggctggatcatcaacatttcttcaattatgggtatgattggtgggccggagaatcgtgagtttcaactcggtctgtggatctgaatgttgctgatacttgagctagcgtcgtactgtgcatcaaagggtgctgtgagtaatctcacgagacagatggcgctggattatgcctctgataacattcatattaatgctatttgtcctggctgtaagtcaattggtttgaggattagctgaatattcactgacaaagctttagacacccaaacagctatattcaaagagacaattactaacttgactccttgggaagacctaaaacggcgccatccattgaaaggacctggaacaccggaggatattgctcgtatagctgttgtgttggcaagtgatgacgcaaactggatgactggagtttgtcttccagttgatggcgggtatactgctcgttaagtagtttactgttagtctattgacgcttcacgattttctagctgctctcctagtgcaattttgaagtgttcgaaacagtatattcctaagcttgatatcagaaacaaaacgacttgactacattaatgcaattgtaatgactaaaaggcatctaaaagctcacgcaacatattctgggggtgcagccaccgccgccttcggggggcgtgacactctcttaccttgaggatccgaactcgcagcttgatcagcccaattccgaataagcatagtcacctcctcatccctgctactctgggaagcagtatacccaatggagtccttaatcttagtggaagcaccgttctcaagcagaagacgagccatctcaagattgcgagtatcagcagcgagatgaagagccctcttcccatcacctcctttcagatcaacggggacgccattatcgagaaaaacctgaacaacatcacatttccccgcctcaacagcctcatggaagaggagctccttatatccatcccgcgctttgggcgagaccctcttactgcgaagaaaaacatcgactacatcagcatgtccctcttttacagcgtagacaagcggcgtatgctggcaaaaatcctgcattttaacttgcgccgtcacaccaatcatgcgaagtctccagcccggcttatgggcgtcgtcgtattgtatgagaagtttgcagacttcgtggtgaccgtttcgccaagggcggaggattttgtcgagggttgaagcttaggagctgaactagttctgtgtttccacttttagcagcaaagtgtaacggtgtctcgcctcgtttgttgaaagaacttcctgtcgctcggtcgcattcgaggagcagtcgggctgtctctagatggccgccttttgcggcgttgtggatagggagtgcatcgttggcatctcgggcccatggtgacatgctcttttctaggaggagtcgggcgatgtcccagtggccttgttctgctgcagcatgaagaggtgaggagcctagtgagtctaccacgtggatgtctgctccgttgtcgagaagtattttgacagcttcgagatcgccgctttttgcggcttcatggagtgactcatgggtggtttcatttgtttctcctttgttggacatggctttgggatatgtaaactatgacgtggtcagtttcgaaatagtagactatcccggggtagtgcgcatcttttatatgcctgaaagaatcctcggttgtagtaagaatcccaaattttgggtgtttgctgctcattggatgtgtagcctgtccgatcttctcgtatagggaaaataactgcgccccattaatctagagcgaaagcatctggtcgctcgttaaatattacttcttcttggacaagttcatgatgatctcaattcgaggactaagaaatactcagcccataaataccccaaggcaggctctcccgcttctgtacctgctctctctctctctctctctctgtacatgtcctagtaggtacggagtaggaactaaaaggacaatgcgctaatcctaatctagttgaaagtaagttgactatataatggtaaattaatgcgcgggatccatcagtatgaagctattcagagatcaccctatcaccatggagtaattcaaatggcttctactaccactaccattgatgaagatatttcaatcctgaaaactgcattgaaatgctagatagtagagtattgaatgaattaaatgtgcctagtaacgaggttctagatctggggatatccccagggaatcacaacattcgcctcagaaaaagcaatataaactttctcccagccaccgctaagcggtctaccacggcaatacctctccattttgcttccttcctcgtgtgttaatttcttttgccttttcattgagtcatccccaaaatatcacaacgcgaattatgaactatgccctggcacgactaaattccttctctcacgctccatgaaagagagctggacccgcccggttccagtacataccccaagatggcaaggcaagcaagtggaaagcatcagcatagcggcatgctatctgatgttcggggataatgtcaaactgttactgaagtgataacaacagtaaacccgtctcgtcatccaaatggggttaaggtacggagtagtgtgggcaattgttaaatccaaccaatgaacactcaaagcacccctgtgtactaaccggatgtagttagcatattgtcagcatcacccttaactacttctttcgcggatttaagcattcggaacggactaaataaagaggtatataatcggcattgctctcccataactagtctctcttttgacctcacgtacatcaattacatcaattaccaaaatgcatcttatcctcacaggggccaccgggctggttgggtcctcagtgctcgacgccatgctcaaaaacgcagcagtgtccaagatctcaatcctgagccgaagccccgtgcgaatggcagaagacgcaaaagatccacgagtacatgtcatcacccacacagactttgaatcatacaagccagagctgctcaaccaattgaaagatgcggatggatgtgtttgggccctagggataagccagactaaggtcaccaaagagtacgagagatcccactcctacgtggatatcagaactaataatcactagacaatacgtcaagataaccaaggattataccctggcggctgccaatgcgttttccacaatcaagccatcaaatcatcccttccgattcatccatgtatctggcgaaggagccacccagactcctgggcgattctcgccgatatttgcgagagtaaagggcgagacagaagcgctgcttggaacgctgtccgagcaaaatccgacctttcgggtcgatagcgtgaggcctgcattcgttgatccggcgacgcacgatgccatcaaaccatatattccatctggtgcaacggctggagttgttgcaaatcttggagtagcgttgcttggcccgggtattcggtgctttatgaagtcgatgcattctccaacggaacagcttgggtcgttcttgacggaaatggcgatgggacgctatgaagcaaaattggagggtccgggggtattcagactgggaggaggttatgtcattgagaacattggtatgcggagaattttggggctgtgagcatctaagtatttaactgtttttttgttcttactcgttcctaatggcctaataatcaactccaccgacaattgacaccgattcgaatttggcacgcaaacttaccccctccactctagtctgaaagggaaggaaaatgagaagaagccatatgttgaattgagctaatggccaggaagtcccatcctgccttgggcagtaaggctacgtcaaccaaatttgtattccagaaagacaaacaaaaagaaatactgaggatatgacaaggtcgcataagcgggcggctatttttgtacagtgtatacacttgaaagcatatattatctaaaaatctcaatgaatatctgtcaactgcctaatcataaagaaatgaaagttagtattaaccacgatagtaaacccgggcgatcatgactcgaaggggaagccgggcaagtacaaaggatgttgacagatataaacatgacctggcgatgtctattgagccccatcttgggcaggaaggtgttgagaagcgtaacagctgccaagcggattttcgctcaccgaggggatattgttctttgttaacacagcgtaggacatatttgggatttcttatccaatcaactccacgtcctcgtggagatcggggttcacagaacgctgatctcgacctgtaaaagtgacacaatagacaatcctccccgtctgaataagaaaccttttaaagaaacatccttatgcttatttatgacgtgtcgccaatcttgccttcattacgaatataaataaagagacgaactgctgtactgaaacggccacgccacatcagcctactttacttcgatacaagatgaagtacttccaacttggtagtatcctcgccttatgcagcatggttttggccgccgcaattccagacgcctcgcctgatagtcttccatgtctaccacaagggggaggtcgcaacaacaaacctattgtgccgggcaccgagtgtggggatttctggtagggctgatctgcccatcagagcagacatgtttgtgaaaaggtacgtagatcctttcccgacagtttcatcttagaacataaacttactcgactactagccgtgcttcagagcgtgtttgacctggctcgaccctctgccttggtacttgctccgctggattgtgaattttctgttattcgtgccttccaatactcctattttggaacaatctgtttgtatgactcaatgtctcgggatctcacgttctttcttcgttgactatgtgtacgatggctgggagccatttcaatatcattctttaacggtgataattctgtgtagtacgctatccatgatcctttcgtgatatcacagtttacatatcttcttgatcgatcccatacttttcccagttcgtagaaggaaagagaaacgccaaaggccaaaaataattatatactccgtagaccgcaaagcgcgagagagggtggttgcccgagaaaggtgcttaggtaaacatgaaggcatcaacttcctcttggcagagggccactaatcatcttgaactctcaggaacctcatgacctgtacggaatagtcattttgaaacggttgagtgcatatccagtcacctccttattttttccattaggaagtattgagtgatgaatgcgccaattacctccaagataacatccacgtccccaatgctgtctcggcctttcggcgaaagtagtccgcacttcggaaagcggaatgattcttttccatcaaataaaggcgggatccatcacagcatcaagatgtttcaagtacatatcggattcctccactactgcagacgctccgtgggattgaaacaatcgtcaccccacacggagttacagggggtcttggcaaggagctgcatgcaccctggccttgtgcttatttttaacaaccggccttagtctcgagtctgcagattgtccgttcctagaatggcaattatccagctgccaaggagccagaaacgtcgcgcattggtggaactatgggcaaattcatgcaggaacggagcttcagttcgctgccgaatctccaccttccaacatggagcgtttcaacatgaagaaacaaaagtgctctcctactataatatgctgcttgtctgcccttgatagtttcttgtgggacacgagaaggctctctacaatacacgttggacatgatgtttttcaagtccttggccattgcttcgctagcactttgggctaagcaggcatccgcggccttcggaatcactactagcactgcttcctatgtgattgatgctggctctacaaacccgcttaaatttaccgtcagccggacaaactgtgacattacttcgatcaattactatggatccgagtttcaataccagtcgactggatctcatatcggatcgggtcttggtagcgcaactgtgtctgccacgcagagtggtgagttgagaaacaagacgtctgttggaaaatattctgatcagtataggcgactacatcaaggtgacctgcgaaacatccaccttgacacactactatgttgtccacaacggagattcgaccatccacatggcgacatacacaaccgcaggttagtgttgttcgtgcgcaaatgtgttttttatactcattataatcagaacctacaattggagaacttcgatatatcgcgcgcctgaattcagccctgctgccgaatgaagagccattcggtgttgtctctaatattgcaggtggcactgtcgtcgagggagaggatgtggtacgtttttttctgaagctttttttcaatacaaacagctgacacatattagttcttggttagtggacaaacgcgaagcaagttctactcgagcgaacggtttattgatgaccacatccactgtaagaatacctctaccctggccgatgcgagtcgatttaacacaaacaggtgtctctggaagcgcgcaccgtgtctgcatgatcttaaatcaatatgagacatctgctggcggacctttccatcggtaagctcctcatacagcatgacttgatccagactaacatgcaccagtgatatcaacaccaacaatgttggttcttatactggcctatactggtacatggtatgtggaatctgtcgctcaatcagtaactgcctcttactctatacagaactccggacacgttcagaccgagacctaccgccagggcctgcacggcccatactcgatggtcttcagccgaagcggtacccccagttccacccttgacacatcgttctttgccgatctcagtatcaagggatacgtcgccacatctgcgagaggctatgttacgggtactgcaaccggggctgactcgactttcaaatgggtggttcactggtaggtccgatgcaatacctggatgagtacatatctaactccaagacaggtataactctgccgcacagtactggacctacacttcgtcttccggagctttcacctcccctgctatgaagcccggcacttacaccatggtatactaccagggcgaatatgtcgttgccacctcgtcagtgactgttactgccggatcaaccacatcgaagagtatctccgggtctgtgaagaccggaacgacagtcttcaagattggagactgggatggaacgtaagttcattgattttaacccacataattgttccgatattgactgcccatagaccgaacggcttcctcaacgcggccaaccagctccgtatgcatccctccgatacccgcatgtcttcctggtccccgaccacctacacagtcggcagctctcaagtctcttctttccccatggccctcttcaaatcggtcaattcacctttgacgattaaattcacggcatcatcttcgcagaccggagctgcgacgctgagaattggcacaaccctctcctttgcgtctggccggccccaggttgtggtatgttcaagcacattcactttctatactcttagcatgtatctaacttttacacagttcaacaactattccggcgccaccccggctgccccgactaacctcaactcccgtggcgtcactcgcggtgcgtatagagggtttggcgaggtttacgacgtttcgataccggctggaactatcgtcgctggaactaacactgtaaggacttttgagcccagtcagatgatatgatgctaatccggcctagatcaccatcagcgttgcttctggtagctctggagacacttacctgagcccgaactttgtgagtatctttctggttatctggtctttccgatgtaagcttacctgtctcaatagatcttcgattgcgtggagctcttccagtaaataattgggacaaacgattgagttttggaacgcacagaggagcataggggaagtttctctaagtaacaagaatgcgaatcgccgtatcttccaatatcacttaatttcctgttgtaataacgccttttgaaggtaaatcacagaagatgtcataatatagactagatatcatatgtagaaaaagatctaagaaaaacacatagacaatgctcaaacccttgaatggaccaaccttcccccaacccagacagccttcacattccgatcatcgccactccaaacccacttctgaatcttctcctcccaattctccgtcccaaacagatcaacatttcccacaggaccagccttcacaagatctgaactaccatcagaaacaacatccagcggactcgcctccaccagcttaaccccaccaagccgaatcagctgtacatcccacaacatccccctatcaaacccaccaacatcgctcgccatatcaacaaccgccgcgccaccacgcgtagcaaggtaaagactctctgaaacagacaatttctcccgtccatcagagccatcaccctgaggatgatccctttgccacgcagccgattgacccagcaaccgcgaagcaagacaagcctggcgcgccgcctcaagaatactaggactatacccaccactaacatccgtccccagcccaaccgtaatcccctcatcaagcaacgtcctaacaggacaaatcccagaccccagcgccgaatttgacgccggacagtgcgagaccttcgcttcgcgcgcgcggatcagagaccgctcatcggccgagagatgcaccgcatgcgcgagaatcgtgcgcggcgtgagcaggttgtacttatcgtagacggcggcgtagctgcccgcctccgggaagagctctttgacgagcgcgagctcgttgatgttctctgagatgtgcgtctggatgtgcagcgggggcgaatagctcgctgccagctcgccgaggccctgtagtgcggggcgcgtgcatgagggtgcgaagcgcggtgtgacgatcggcttcacgagcttgccttctgggtctagggtgtggatgtgctcgattgtctggcgggttgcgacgatggagtcgtcggcgctgaagtcgcggtagtagtctacgcagaagtctgggttgtccatgcaggcgcggccgatgaaggcgcgttggccgcgcgtgtggcagagcgatgagagggcgtttgtggcggcgacgtggttggttgcgtagtaggaggcgcaggttgtgccgtgggagagagtgcgggagattacttggtcgtagatttgctgcgctaggaggggtgtgtctttagggtcggttttggtttggtggcctgtttttgggtccggtggtgacccgaaccgggactctactgggaatgtgtaggtctctagccagtctaggagtgttgatgagccgaagaggcccgcgttggggtattgtggggcatggatgtgggtgtctgggtagatgtagttaatattaagatttggccgtccggattagggtttaggaagttggatttgatgcataccaataaatccggggaagaagaactcattttgctcctcactcgcggtgacaatcttcactctgaccttcgaatcatggccccgggtctcaatggcgtcgatattaacccaaccattcctattcatgaattcgatgaactgattctcatcactgccgtgccagtcccaaccttgaatgcggccatcagcagcagagacccataatgcgccttggttgcgagacaattcaggcttggagctagagtctgaaagaaccgtttgaatgaatgtgccacgatagacggtaaaaccatagtccgtttgcgatcccatattggcgggatatttaaaaggcccaattattggcgtagatatgatcaagttgcggacagatggcgctctccaaaaggactagaccacgaataccgatgtatattatcgatgaaaatgcagatcagtctctacagtggaaataaaaagaccgaaagaccaagtcgaaacgaacaaggcgaaaaaagagggtcaggcacacgtttatatctgtcttctggttacttcttgccaagcgagcggctgagataggtgtccggaaacggtggacccaagatgtggagaatttcgatgttgtccctgcttgattcgaatgttcttcagcttcctttgcggcattcaaggcttgattgtaggttgcgaggatgattagggccacggcgagtattggggatggcgggggtcggccgtctccgatagcaatacggtgaggatacggtatttggagcgggtgagtttttttttgatggtgtaatttacggacgggcagtactgtatggtcacaaagcaccgataaggccgtcaaaagcctcaagtttacatataaagctagtgaatgtcgtgatttgttactcttcttattgtttcaaagattttcttacactggatcgaattgaatgtctagaatattttttattctttgaattgttttgttcttggtatccatggatgccggatgattatgttgaatcgatccagcgctcacaagaatgtagtctgtaggtagtctttgttaccgtcaatataaaaaaaatgttgaatgtatacacagagaaaaggaagcatcagaacgagcccccatatataaaaaaaagcaatcagcgcggcatgggtatcatagatctttcaagatctgtctaatcagtatcctcgacaggcccgcaagtgcagaacaagttctggtcaccaaaggcatcatcgacacgagtcactgtcggccagaacttcttctccaaaagcaaaggcaacgggtaagcagccttctcacgggtgtaagggcggtcccactcggtaatgagcaggtcgcgctgagtgtgtggggacatcttcagcacgttgccctcgcgaggctgggcaccagactcgacctcgctgatctcctggcggatggagatcaaggcatcgcagaagcggtccagttcagccttactctcggactcggtgggctcgatcataagggtgttggagacgggccaggacatggtcggggcgtggaagccgtaatcctggagacgcttggcgatatcaatggcctcgacaccagaggtctccttgaaggggcgcacgtcaagaatgaactcgtgtgcgcagcggccgtgctcgttggtatataggatcgagtagtagggcttcaggcgggagaggatgtagtttgcgttgaggagggtgatcttggtggcatgggtcagaccgcggtcgcccatcatgttgatgtagttgaaggtgatgggcaagatgctggcactgccccagggagcagcggagatgggaggggagaaggtgtcgccacgcttggactgcaggtactcgctgattgggtgcgagggcaggaagggacgcaggtgctcgccgacaccaatgggtcccacgccggggccaccgccaccgtggggaatacagaaggtcttgtggaggttcaagtggcacacatcggcgccaatctcaccgggcgagcagagaccgatctgggcgttcatgttggcaccgtccatgtagacctggccgccgtgctcgtgcaccaggcgacaggcctccttggcaccgggctcgaacacaccgaaggtgctggggtaggtgatcatgaacgcagccaactcgtccttgtgcttctcgcacttggccttcaggtcctccagatcgaggttaccggtcttggtgtcacacttgatgctcacaacgcgcataccagccatggcagcactagcggggttggtaccgtgagcagagacagggatcaagcacacgttgcgcttggcatcacccttggcctcaaagtacttcttgacaacacgaagaccggcgaactcaccctgggcacccgagttgggctgcacagtaacctcagccataccggtgatatcagctagctggcgctccagatcgtcaatcatctttgtgtagcccttggcttgctcggcaggcatgaaggggtgaatctgggagaactcgggccaagagatgggaatcatttccgtggtagcgttgagcttcatggtgcaagatccgaggggaatcatggagtgggccagggaaagatccttcgattcgaggtggtggatgtaccggagcatctcagtctcggagtggtaggtgttgaagactgggtgggtcaggtaagaggaggtacgctcaaggctggcgggaatagtggcgagaccaagagtaccatcaacctcgacgggagaggcagacttgtgagcggcaaagacattcaaaatgcccttcacctcatcccggccaacagtctcgtcaagagagagaccaaccttgtttccacccagacggcggaggtagacagaggcagcgcgggcctcggccataatggcatcagcttccgcagcactgggcagttcaatggtcaaagtgtcaaacacaacgccaccgtcagcgctgttagagcggacagggacatcatagcccaagctgacaagcttctcgcgcagcaatgacgtcatggacatgatacgctgggcaatggccttgaggccagcagggccgtggtagatagcatacatggcagtcatgttagcaagcaaagcctgagcagtgcaaatgttgctggtagccttctcgcggcgaatgtgttgctcgcgagtctgcagagccaggcgcagagcccggttaccaaggcggtccttggatacaccaacgacacgacctggcaccttgcgcttgtacttgtcagcacaggcgaagaatgaggcgtgggggccaccaaaacccatgggaacacccagacgctgggcacttccgaacgcaatatcagcaccaaactcgccgggggccttcagaacggtcaaagccagcaggtcagtggctacacagaatgtaccaccctggccgtggatagagtcacccagagcctggaagtcgtagatacctccctcggtatcggggtactgggcaagtacaccaatcaagtggtccttctggtccttgacgatcttgaagtcatcggccaagatgtctccaatcacgaggttgattccgaatccatcggcgcgggacttcatcactgcaatagtctgagggtggcagaggtgagacacaacgaaggacttctcggccttcttctgcttggaagtgggcattgtggcgtaggacatggtcatagcctcggcagcggcggtggcttcgtccaaaacggaggcattggcaaaggccataccagtcagatcagcagtcagggtctggaagttcagcagagactccaaacggccctggctgatctcgggctggtagggtgtgtagctagtgtaccaggcagggttctcgagaacattgcgctggataaccggaggcacaatggtggggtagtagccggttccaatataagtcttgccggagatatcaatctgcttccggtaggtgtccagcagcttgagcatatcggtttctcccaaacctcccagctcactggagcggtacaggctgatatcggcatggggctcggagaccttgaggtccttcgtggagagaatgtctgcgggcaggacctgcttcacgaattcatccaaggatcccaccggcgggtcgagcacggcgagcatctctgccgcggcgtccggggaggggccaatgtggcggcgagggaaggtatcgagaggctggaagatatccttggggtggatctctccattgtcggagacggagctagtatgaacagcacgacgaggcacaggctgagaagtagtcaatggtctccgagtgttcaatggtgacaatgaagatcgggcaattgaaggcacacgaacacgcgaccgcagagcaagctggcggccgccgcggagggcgaatagtgatgccgccatactgagaccggaggataatgagggctttagggaaagcactcaacacatccacaagtaaatcagtgaatcaatgagttaggaggatgaagaagaagacaaaaagagccacagctccagaaattaatatttattgcccacgcctctttcctttccctgtccgatcgtccgatgacggagaacctgtcgggaaacgtacagcggcgataagaaattataagaacatttcttatctgaccaatcgcagctgccactatttgccactggccccagcttgaccactgaccgccttctgctcggagcaactagccggtttcccgtcggggaagtcacgggccattgatctacgttactccacgaattccccgccgaaggggaagctccgatggtctcatagctttccttgagcttcggtttatggtcgtttgggagaatacgacatactaaaaataaaaaaggcctgctttcattactatctcaatcccgcctaggacagaatatttcttcgggctcaaatcgtatatcggaaggctgcatcaccctcaatgacccgctttccccggtccgcctgcttattacagatccggaaccacagactcaatcccaggactagcaggacgatgagaatgttacacctggtgaaacaaagtcagtacacgaaaataatctgagacaggagggacaacgtacccaatagcggcatacattccgggtcggtactcgggtgcgtcctgttcccgaaacaccaagctactcacgataccaccgaggcctccaaagcccaccagtgtagcactggagaaagcacgtgtccactgtccgcgcacattgttcgcctggtatgccatgcaggctgggatattagcattggcaccggcaacagtgaagaacacgccgaagtagcggacggcatcgctcttagcgaagcccattaacggcaggccaattatcgcgagcaaggcgttgaaaatgagaatcggggcgcgcatgtggtacttgtcgccaacccaggccgtggcgtacatgacgattcctgcgaacccgtaaggcggcgcgacaaggcattgggcttggccgacgccgtatcccatcccggacatgaggattatgggcaggaaatatgcgatggcgtaagtgacggtagtgagacagctgggatgcggttagcagtaatcgggtctgcttgaaaagggaacgcacaagaagatcatggcaaacccccagatcttaagatccactgccggtttgaggaactttttgagagagaaggcctccatatcgccatcgtttctgtccttattgatgcgacggatgatgaatgcgcattccctctcgtttaggaagttccaggacttgtgtgcgcggtcggggaaatcgacgaggaagaaaaagcataggatgccaatacagccggtgatctatattttttgttagcttggttttttttttgggttgacccaactctccataccactccctcaaggatgaaaatccatctccagccggtcaggccttgctttccgttcaattgcatcagaccaaacgcaaggatacccgccaacgcagaagcaacacatccaatgagatagaaaacggagaatcgtttttggacgtcatctttgaagagtcagtactgtgcagtcgctcggagatattcctttcggccatttatcttacatcgggtataccagcaagacagcaagtagacgcagccaggaaagtaaccagcttccaacacacccaaaagcacacgcgttccaaccaacgcgccccagtcctggacgaatcccatcccctgcgtcggtcagcaacccaaagtcttgacgtcgagaaggcagaaatcccttacaatcatgatccccgcccagcatagaataatcgagcccaggaagtaagttgggccaacttttcgaatgatgacggtcatcggtggttggaagagaatatagggcacaaagaacatcaggacgacaatggactattcagaagttagcccttcgccctccgagaaatggaactcgtttgtttgaacatacatagcgctcccctatgtccaatcgcaattcctttttcaatctttccatgggtcagccatttttgaacacggtctcctcgatgattgtagtcttaccctgcaacggcggccatgctcaaattcgtccggtccatgagcgagatgcaataagctaatccagtcattgtcaccagacgcagatcaattctccgaataatcttcttctgctcctgcggtgtgaactcatcgtcatcgtcgctgggaaggctcttccccacgatgtcctcgatgcggtgatcagcaggtagtttctcatcgatgggagtcattgtccccatgctgattctgaattgaattgggatatttaatagaaagataagatgcaggggacagcaagaaaaaagaattcaattgtcttgggccagaaatagaagacaaatctgcggccttatcttacagaacgacaaggatcaagaatttatatatccaagtagaaacacaccgcacaataaaccaaccattcctaaaccagccattcaagatcgccgctcgcttattgcaacccgcttcaagctgcccaggaaattccccaagaaacaagacaatcgagatcgcaatagccgacagaaagtggccaagtgcctcgggacgagcacaattgtcgtatagcaagggaatacgccgcaatatcgtccgaaaaacaaatgagggggtaatcaccccactgtggacaaactgtacgagttatctcttacgcattgagctggttagcatcggtggcggctgctttgggagataatccgggggcgatggggaagaaatgcgggggaaggtacttggcaacttggcaaatggtgcgttgactacgtgatgcactttgatcccctctttcgtttggtgctttagtctgattgttgggcagagatgtcacttgtgggactcgagatgatctgttctgtatgtggtttgttgccaatgtttcttggttagggtttcttgacttttgattcacgtactttgtcattgttagcgggaaaatcaaccgggcccctcctgacttgtttctaaaatttcaagctgagtagggggatattccgaggctgatctcgtactcgtcggcgggtcaggaagtgccacctggttatgaggaaccttaatattccatctctcttgatacgtcgaagctcgaagaatccgaaagtataacttgccatgtagaaaagtatatataatcctggtcatgctagtatgatcctggtcttctgccggcagatagatagcgccgtgtatggtgatatcatcaccatgcatggataacctaggtatatccaagttctgtggcaagcggttggttcttaatacagcccactatagacgaatctgtcatttgacacacgtggtggatggatatccaccttataaagttgctataaagacacggagcctgattatagacggtggataaaaagtattgaccttactatcgtcaattaaattctttttttacacctcggttcgatcctaaaatgctaagctgattaaaggtagcttccatcatcctcgtattcgtcctcttcttcatcctcttctaaaaggagtctctcacgttcttcctcatccacccgacccttctccctcagctgcctcacagacacgaaaacaaagattacgagtgatgttccaacaatgaatcccgcgattgccaagacaacattgattggaattgggtttccatcaaacgtatgatgcgtcaatgcgtcgagcccgtactgagagaagtttgcgattccggagaggcaaataatggcaccgtacacacgcccaaatgtggcaaagccgaatacttttgtagtataatcactagaaccaaggattagtaagtagaatttggcagggggggaaaagcagcatacgacatggccgagtaatagagaggccggagcaagacaaacagcaaaacggtcatataaccagcccaaactgccgggatggagttcagtacaccaatgaccgtagtgaaaagcacaatcagccccagcatcgttggaacgctaaggcgatcaagcagaaagccgatcaccggcgtgaagagaacgcccccgaccggtagtgcgacgtcgaaaaaggcacctattttatttgcctcctcgatcgattcgagcatgtactcatactgcgagcgaatcgtggcaataaagtagttcatgcgaatcatttgcaaaacagtcatcagtgtaatcaggataaaccacggcgttgccatctgtttatgtgccggcaggccatgcaacacaccccacacccaactcgtctgctggcgatcttcttctcgttccgcacgcatctgcctttcatctctatcaccaagcaccgcatcgatctggcgaagctttttctttctccgctccgcccgacgtttcctcacccggtttagctccgacgtgctctcaatttcatcgtcggagtcgtggacgtcgcgtgtagcgtcttcggccttttctaacttgctctgcaagtttagagtcgagacataatcgcgcactggcatgatcgtcaccagcgcgatgaaaatacatacggggactatcagatagcccaaaaagaatttgtccggggtgaaggatctgcccgatttctcatagacgagccggtagaagaggaacacagcagcagaggcatcgaatgcaccagtcaccagcgcgacgatcgaacctgcatatttagggaacgcatttgcaatttggaacgaggggacaaataaaaaggtgccagccagagcgaggaagaagttccccgcgatgtagccatcgaagccgggttcatggaacgcaaaggccatgatgacagcgccgatggcaagaagcaggcaagcaatgaaccagcagatacgtgatccgcatcgatccaaaactgtcccaactggcagagcggagacatttgctgttatcgaagcaatagtgaagaacaggttgagtctagcatttgattagtggcaagcacatatccgggagtctgtgcaacactgtgcaacaagcatacccaaggtcctgctgtgcgcaaagctcaagcccttcaaccttttcagcaggagtgcaacgttcatggtaaacgccttcctcgacgaggacaggcttgagcgccgcgaagccaaaaacgattcccgacgcactccaacacgcgatcacggtgacagcaacctgggctgaaagttgttagctgtttgtcttacactgggctgaagaggacataccaattctctttgtggtggaatgtttgtacgctggtgttccagggcgcgtttctgcgaccgggatcgcgtcgctcggaggctggatgacatcgtagctgattttccggcgaatgggaacgaaatcgcagtcatcgactaggtctggttcaagttcgcgatcaataccgtcaatagcggaaacatgctgcaccagtgacattgctctgtgttgaacagacggggtgttgtgtggaggaaaagttggtttgatcggcaaaacttggttctttcccttttcctgacacctctgatttttgctctttacactcgaagcatactagctacattctcaagctcattacactgtggaaatatggttattgagacaaggtatgtagctgtttgtcagctctgattcgctcaggaatttgcctaaattgccactgtcgtcaatttcgtccaatcacaaaggatgtctaggtcaaattaaggtgagggcatccatggatcatcttgactttataattaaagtattatattcctacctcttacctcaggggctaacatctacataatatatactatactcacttaataatactccttctcaagcagccgtggcagcggatttctcctttttgattgacctccattccatcgtcagcgcggggacgatcatcagacaggacaccgccagggcgacaatgaacgaccgctggaggccatcattgtataacgccagaacctcgctcaacttggtagcagggacagcattcgacagacctgtcgccccagccgccataatcttggccacatcaatcccctgaatgtggggtaggtttgcaccgaggtaattctggaagagcgactgagcaacagcgataaagacagctccgccgagagactgcgcgaagaacatcagcgagacaccaatggcgacctcatccatagggagaatagtctgcgccgccatggagggctgctgcattcctgtgccgataccgatgccaaacaacacctggtatccaatccaggcggagtggttggtgtccaccttgaaggttgtcatcaaccctgcgcccgtcgacatgaacaccgccgcaataaacatccacgggacgtagtatcccgttgcggtgatgattgacccggagagtatggctccgacaacgagcgccagcaccatgggaattgtgtcgatgccggatttcacagctgatgtgccgcgcacgccttggaaccagagtgggagcgtgtacagcatagagattagtcctccaccgacacacagggaaaatactactccgctgatgatgctccgctggtttaatatgtgaggcggcactgttgcgtctttcttgagccggatctgcacaccgacaaaggcaatcatcagtgtccctgagatgacgaacagcgcgatgatgcgcccattgctccagggataggttataccgccccactgcagggcgagcaggaagcagatgacagagggcaggaatagcacactgcccaggggatcgaggcggaggatttgttgcttccaggtgcatggttggggcttgtgggggacggccaggaaaaggaacaagatgaccatggtgaaaccgccgatgggcaagttgatatagaagcaccaacgccatgtcacgttgtctgtgaacgcaccacccatcaaaggtccgatgattgaggaaataccaaaagtcgaccccatcagcccgacatacatgggccttttggccagcggcacgatctgtgcgattatcactgtcgcgccggaaaatatgccagctgatccaatcccggctatcgcacggccgacaatgaaggcatcagagttaggggcgccaccacagacggccgatccgacttcaaaaatgaggatcgcgatcaggaagatggtcttggtcgagtagaaggtgtacaccttgccccaagatagctgcgtggcgcaacttgtcagcagatatgcactcgcataccaactgaggtcgtctagggaattgaactggtttgcaatgcgaggaactgctgtagcaatgatggtgcgatcctatagtgttcaatgtcttgttagtatatatctacatgggcaatagagaatgcaacattcataccaaggcaaccaaaaacatagcgaacagaatagaaacaataatagctagcagccgggtccccgttggtaaatgagtctcatctttcttgacctccgagggcttctcggtggtagcttcctggtcgagctgcttttctatcgatcgaatcattgtataatacgacagtggttgaacttgaagcaagggtatctttgcaattgatctaaattaacaaatatgaatggaaaagggcagacttataaataattgattgtagttcatgatctcgggggggtgaagctgggttcggcgccgaataacatagtacgaaattcggttcggcgccgagctaagagtcttggctccttcttgcttgtagcttattctttcgccaatacaaccaacccttcatgctatccacacgctctttttcttctattaacaaaagtgtggcgtgacagtcatcgaaacatacaggaatgcaatgcatcgaaagagcttaagaactttcttctatttcattgtcgatatacctaataaagagtcactgccccgttaccacaactccaggaattcgtctgccactttagtgaggagtaagctctaaaaacctgtcactagcctagccaatgtcccattgatagactgatcgcttgccaatatctagtaagaagcataaagggtttgttcctgtctgacaccaagttgaatacaatctgattcgatcgcgatgatcgtcactcctgacaaatcgacgtgggggccgaactgacaagagctcgaggacttcgccacttgacttccccgcacagaagaacataggcgccccatttttatttctccttcggcggagtcctggtgcttgatggttgaatagtctctactagttgctcaacaacttcccgactgcaatcgtgaagctgacatgtccaactcaaaacccgaacgtggaagcaggggccgatatgctcgcttgctttgtcaaggctgcaggtccaggaaaatcaaatgtaatctgccagatataaacgagctgggtcctcttggctctccacaacccccggaaaagtcctgcgaacgttgccgcagcctcggtcttggatgcgttattgagcgttcgactttgggtcgtccatccttcaagcgcggtgaaaatgagtcaggtcggaagtcaaattctgcccactgtcattcagctacgcaaaatgaacaacctggcaactctctgatcaaggactactcgccctcggagtcgacgacgagtccagaaaccactcaagaaatacgtgcagtggctgacaagacggtgtttgagtctgtcattgaatttcaacacttttttgcctcggccttgggcaaagaccgaatatttggtgctacaattcctcggagtacttcaggctgcatgactcctctcccagagctggtgagccacgaaatagcgagcagtctcgacaaggagtaagcacctgccgttaccttgggatatcttgactgcttgtctaacatatgtcgtattttaagcctggcttggtataggttttttattcccggtctgccaagcttagtagacataagagaccgtctcaagggagacgacgaacttaatattggcaccaatttgctcttcgcattgctttgtctgatctcatgcgatacaacaggcaaatttgaccggcttcatccacgtttgaagtggaaccttcagctggctatttcatcctatgggcaagagtttatcttttcccctcccactcactgcgactctgttgttgtctgtattatcttggctgattacaggccaaccaccgtgggagtatctcaacatactgcacacagagcgatcaagtcgaccctatatctcaatatagctttcaaagtcgctgaaaaattagagatgctaccttcgcaactcaatctaagctttgcagatataccatccatgagtgatgaggaatttgaacatcgaattacagattctttgcaaggaatgaaaatcttcacccaggatatcattctagatggactattgtcaagaccagtccatcaactgcaagaagcgctggatcgcatggcaccccatatccacgtttatcaaaatgtcttcaggcatcgtccttgctcaccaaggattattttccagatacagtgggccacagcgagctatatgcttctagaatctttgaaagcaacaaaacagaactggaccaatccacaaagactatgtcatgttgtcgacgagactgaacaaaagtgtcttgaacagatcagattctgtgactgggcactgtcaaatacggctcagtcagggccgcccgaggaggtaagggctgctcgttctttgctggaatatcgattccatgcagtaataggacgatcatatggaattgcgcttcttcacatcatgatccttcggtccagagcctcaaacagcagcttctcaagtgattccgatataaatatccaggaagctagtcaaatgggcgccaaactctcggatgctatgagcaatacttctgatgatctcggcattcaaattgtgacattcatctcacgctttgggcgtcccttccccgatcggctactcgcagtgcttgaaatgttcatcaagggcacagatttaaaacttgatggcatacagtttcaagctccattccgggatatcgttctcgatatactcgccttttccagatccatcgtggagaataacagcatcaatgtcaagaacttaactggaaagatgagagaaaatgccgaccaccaagtcttggttcttgcagagtgtgctaaaagacttggtaacatggttgcctcgcctggaaaatcgattgaagctgcttttgctggcggttgcgtgtttgccgccannnnnnnnnnnnnnnnnnnnnnnnnnnnnnnnnnnnnnnnnnnnnnnnnnnnnnnnnnnnnnnnnnnnnnnnnnnnnnnnnnnnnnnnnnnnnnnnnnnnnnnnnnnnnnnnnnnnnnnnnnnnnnnnnnnnnnnnnnnnnnnnnnnnnnnnnnnnnnnnnnnnnnnnnnnnnnnnnnnnnnnnnnnnnnnnnnnnnnnnnnnnnnnnnnnnnnnnnnnnnnnnnnnngctgtttttgctggcggttgcgtgtttgccgccagcactaaagtcatgatggcattcattgatatcatgagagatctgaagaaagaaagcgatcttggaaaagctggcccggtgccgctaactgtgtctgatggctcagcagaagggccaagcatgagtacctttgaagataattccctagattcggggaatttgtggtctactgagccaataccaaattcttttagcgctgaagatttcgtttttgactggtccacgataatggattttgatgaaaatatgttgtacaatgacctgaattttgattttgcttcgtgttaaagcatttattggacaagatgtatataactctacgggtgcagaatataggggttgcctctaaagcaaagtgcatgaagagagcaagaagggaaagaagggaaaggaggaaaaacataatgacaatactcaacatagtagtacagatgattgttagttcgcttgacacaaaggtccaaacaatgcaccgcccgtcacctcttcccagccttcattgcccacgcatcgccagcaccaaaacacaccctctgggtcgtacttcttcttgatcgacagaagttggtcatatctatcgccgaaccagtccttcctccagtccggatcatacggatcggcctcattcagataagttcccgtcgcaggagccaaagctttcatggctgctaacttccttttagtgagttcctccttaactttttgaatttcctccgaacccgcatttgccggccacatatctattccttgtaacagaagataggctttcctccaagctggattcacagaggtatatggcacattgttgagaacttttccaccggcaacgatattcaggagcacagtgttgtttgcagtatgaaccccttctccgacctcggtggtcaaaatttgaagcaaatcatatagctgttgttctttgccggataaagaatctttggcgaagaatctcgatgccatgagtggttgattattacctgcggacgtgtggtgcgtcgacgcataccatgcggcccacgaaggatgagtagaccatttagatgataccaggtaatccgttccatttccaggaagcagatcatcaataatcactcggttcatcagatcttttgcgtgattgatcgcttcaattgaatcattcgcgaggaacttgatgaagggagcgctgtatacccaagattcatacttccgggtgaggaaagcagtaccggcgaacccttcatcaacaattgcaggatatttcgaggccattcgagccgtggcctgcaagactgcagaggtattgtggcccaaatccgcaatagtcaggtcatggtaaagggttggacgagtaggatacgtcttgatggtagctgatatgacaacaccatatgtacctccccctcctcctctgagggcagtaaagagatcggagttctgacatgcgttcgccgttacaagctctcctgacgcaaggacaactttgtattcaaggacttgatctgttgctagtccgaattcgtggctgagggaaccatgacctgctccctgaagaaatccgccaatgcatccgacggtcttgcgttgtgttagtgagattgcattgcttgagttttcattcaaactgatgtggacttacagggtcacctcctccaacaacgacatggcggtgtttagaggcgaaactgtagacatccttccacacatatccaccctggatagtgatcgcacttccagtccaattagatgggcagtttccttccgaataattgaatgtcttatgaaaatgaagcccgcctttgatatgctttatccagatcgacaaactgccgtatccttgcgatctatcatgattttcatcgtcagtcataagatacttatataaagattaaaagtccaccttaccgctgtgagatgtcatgcccagtattcttgataacgagtcgcacattgttctctttggcaaaccttatgccagcagcgacgtcatcggccttggtagccttgatggtatacgcgggagaagttcctagctcgcacaacggatacgcggctaccgaagcgttgattggggggcacgtatcaacgagtggatagctatatccgattggagattccgggatccagaattcatttgtccaatttgaagcaatgcgttgacattctttagcgctgtatccagggccgtgatagcatgctttggcgagaggctggttttgaagaagttttccttccaccgtagagttgagagaagtccatttcgaggctgatggccagcaatcgtctgctggtgtctatttcaacttggattagataatttgcagtatacagatccatcatcatagaataacatacgcatttgcatttagcaaagacggactgggctccagcaaggagaaagaggcttttgagaagcatgttcattggaatattcgttaaatgttttactgattactagcgagagaacgaccagccgtatttatatcaattatatattggttgctttacccttccgtgtgtggcttgaccttcaggcttcagttcacattgatgtaagcggaagcggaatcattgaatcaatgtaccgcaccagaattccatggacattgtggcagtgcttcgcaaattctcaatgcccaatactatgtcaacggaattacagcaaggcttatttcagtcgagtctcatatatcgcaaatttcatttgtaaactgagtgcgcaaatttatcgcgcaaatttattatccgatgaatgatcgtcgggtgttggcgccacctcgtcattcagatcagcgccctggccgcagacaaagtaacgcgatgactgcgatatgtgcgatatacagcgtcatttacgaagccagcctgataaaatgaggtttataccctatgcatacagttcacactttgtttctcggcctgtacccgagacaacactaggccatatatagctagctggaaattttaactacctataagtggccaataaattaccacttgtcctaatcaggactcgacttgtttcgtgtacgggccgataaagaaagcccgagtgtctatatttatcgagggatatcctgcattggtatacatatatacttcttgtgacgataggagtagtttagtgagttattggaagaaccctctctccggagaacgaagcagtccacgctttagataggaaggctatgcagtagctaagcatttatttccggacagaaaattccgctctgcagatacagaaatgcgcatgcacgcaacagagaaacttgaatgacgatcttcgcactcctgaccattattggctagcactggggcctacagactttggggattggggctaagcaatgcaaagtctggggctgaattaaggcccaaaaaatcaagacttttcagagggatcggcagtgcgccctagacatgtaagattttgagtaagattttgggtttacgggatagataaaaggtgggtgactcgggggtttccttttcttttcgcaatctatttcatttcgtcttttcacgaatccttatatctacttttgtcggctttagcgctcttcaaaatgggtcctttaaatccgagacaagcggccgctgggagctatggctgctctatacctgatcacattgaaaatggtgagcgataattgctacgcatggattaatacgccaactaacgttttgaatagttggtggcggaccatttgtgggaaatctctcattctaccacttcaacatgattgtttccggtgcctgcactatcatagtgctgttcttgactttcggtcttatgggacgccatgcgatgcgcatgagtaaccccgaagaacaaatcaagtaagtccaccagtaaggtcgagacagccttgcgatactaaaagcatatacaggatcatgcgaatcgtcaacatgattccctcctaccaagtcctgtccttcatctcgatctgcgttccaaactcctatatctatctacaaggcttcaccgaggtattccagggtattgctctatacgcctttctgatgttactctgcgagttcttggcccccacggaccggggtaaggtggaattcttctcttcgctcgagacgaagagacagtggcaaccaaagaagaagagaaacggtcttgcgttctttagtgtaagtaccctgaccattgaaacgcacactatcgaatgctgaccgaatcttccctttagttgacctggtggtctgtccttcaatatccaatcatcacctgtattacagctgtcgcacagctggtgacccagttgttgcacaggtactgcctttcaagcaaatcaccccacttcgctcatgtttgggtatggatttacccttccaatacgtccccatatacagtaaagagagactaacatagatgatagatcacagctgccacatctctgtcaacatcagtggccgtcaacgccatcattcaattctacatgaacatgaaggaacatatgaaagatcaccacccactcaccaagttgctggcattcaaactgattgtcggactggtcatattggaaaagatcatttttctcatcttggagagcgccaatgtccttcacaacaacgacacattgacctatgtcgacgtcatgataggtctaccagaaatgatcatctgcgtacagatggtcccgctatgcttgttggtcctttacgcttaccggacaaagccttacgaaatttccaacgcgtctcgcaccgtgatcctgcggcctcaagagtaccaggccatcgattccgatggcgacgaggaggtgttgacgagtggattccagaaacgctaccagggtggctggatgggactgcacgcatgggccgcttacttgaacccgctgggcttgctcatggatgtcatatccgctcatagaatgatctccaaagctcgggctctacaaagggcgcagatgaaggagcaagcccagaaggaggaggaaatgacaagatatgagaccggatatgatactgccgagggagcatgagttttcacattttattatcccagtgaagttacaggcgatctagactagattttatgcacgatgaatatgaatgcacatccgcgatgactactatctgaacttggtggttgtgaattgtgaattactgacagaaagcttgcattgacttctatttgtgcttggctaaagcattaggctttctcacaacagtagctgattaactatcagcttatttccgcataattgcgcgtggcggagccaaaagcacgacgatccaccgtactttagcgcaaggtggagagtttaggggcgaagctaagcccaaaaggggaatccagtagcgccaagactttttcaaaagagtggggcatcgcgatcggcagagcctctggcccggtccctcgtggcttccttccctatctttttgccctactcgtagcgtagatggtcacgtatggtactcgtgttgacatgcctttcctgaattatttgatcgttcctgtctcttcattgccatcttatcaatttagctactttcaacccccaaaactccatcaccatggttgaggtctacgggttctgcgacccaacctttcagtcgcaagtagctgctgggtcattccatcgggtatagcttcttagcagaggctacaaattttgtcacactttcctagactacatgacctcattgtgtagctcaactagtcgactgacgcgggattccactcattctctgacatctagagtgatatttccaaaatttcggttcaccttcgttgtagattgtggaatttgattcggcgcgcgcaattaattgcgcgctagctttagaagatggcgggggcggggttggtccataagcgcaactaattgcgctttacctcgtttacatatttaggagactgtttgcacatctattttctgtttgcatgagcttgatttcttccttttcgtcccaaagataaacctcttcttcaactcggattggccgacaccatggagcccttcaaagacaagataattcctggccctggagatctccccaacgtccgtgcagatgcccaacgcgttttccaggtcctcgagtcaggaggtgtggttattctaccgaccgaagtgggctacggactgatggccacttctgcggaggccattgaccgtgccttcgccgttcaccttcgttgtggattgtggaatttgattcggcgcgcgcaattaattgcgcgctagctttagaagatggcgggggcggggttggtccataagcgcaactaattgcgctttacctcgtttacatatttaggagactgtttgcacatctattttctgtttgcatgagcttgatttcttccttttcgtcccaaagataaacctcttcttcaactcggattggccgacaccatggagcccttcaaagacaagataattcctggccctggagatctccccaacgtccgtgcagatgcccaacgcgttttccaggtcctcgagtcaggaggtgtggttattctaccgaccgaagtgggctacggactgatggccacttctgcggaggccattgaccgtgccttcgccgcgaagcgacgccggccaggtcacgctcagggtctatatggcacacatgaattgcaccgggaacttcacatcctggacgaccagcggtttgaaatgacacgtgtgctagtcgaagacctagacatgagcttcatggctgttgggccatgccgcaacggtcatcatcttcttcgggctttatccccacaaaccctctctaaggtcacaaaggacggcactatcgctatgttcatcagctgcagttcacttctgagagagatttgcagactgaatgctacatcaggccagctcatggtaggctctagtgcaaacgtgtcaggtggtgggcagaaattccgtgtcgaagatattgaggatgaactcaaggaggcggcggatttgattgtcgattatggtctgcaacgctatcatgtatatggacgaccttctctcatcatggattttgaccagatgaagattttgcgaatggggtcatgttatgaactgttccgcgagcgcatgcggaagttttggggggtcgacttgcctgaggaccctgattatcgtgcttgagacttttgtttaaggcgaagccgaagactatggaagacattgttcattcctcgactagacttttgtatgcctttcctaaatgtcttcgcctacatttgataggtaccttgtacttcacaacctagttattatttagtctagctcatcctctctagtgcacattacaactcccaaatactcaaccaagcgctattaggtgatgaacaagcaaacagaataaacgaaataccaaaccaaagtcccaaatcaagtgtgactccccgaactttccgattccgaatcccactcgtcatcccctccagcactttcctcctttgcagcaatcacaatccacaagattttattggcctccttcgtcttcttcttttcctgcctctcctgtctccttgtagtcccccgatctcctctcctccctgacctccgatcttgcctagcctgatcctttatcatcttctcattctgcttctgttcggccttgctagcttcttttgcaccccatttcttccaaaatccatcaggcattgttggttccttaacattattgaaggaaagtgacataactcgatttcccaacaaactcatgcgctgcataatggggtggttgttactttcagaagcatcctggtactgctgacgaacgaagacattttcttgatcacccaagccaacatattcaagcatcttatccgtcttgcacatttggacatgcaaacccttgggatggaaaagctcctcgttcgccttggctaggtacttcttcgtgcgcactttggttgtaactgatgagctgaccccagctaccacgttgacactcacactgaccatctgcacaatcatggagggggccatgccgccgacattggcggcgttgttggcggcttgaagggctgggttcgctaggaacgcttcgtttagttcatcgatgaaaacgataagttcatcggacgagatttggtgctctagttctggtacgcggacgcgagcgaatgggctcatgttctcgccgttgaatcttctatgacttatctctgggtaagtgatacattggttagatttggccactaattcacggataggctttatactaacgaggtataacacagggccgagatacgcttggaagctggggtgggagctgaagtagctgtgttggggggtagggttgactttgctgggctactaattcgttgccagcatagagttcactcggcggaagtgcaggtggttgctgtctcgcatactgggcttctaacacgttgccagcgtagagttcgctcggcggttgctgtctcgcatactgggcttctaattcgttgggagcgtagagttcgctcggcggttgctgtcgcacatactgggcttctaattcgttgggagcgtagagttcactcggcggttgctgtctcacatactgggcttctagttcgttgccagcgtagagttcactcggcggttgctgccgcacatacaactcgttgggagcgtagagttcgctcggtggaagtgtaggtggctgctgacccacatactgctgtggcgggccgtacatttgcctgggattgtatgattcttgcggccactgcggctgtggcgcgccatgctgctgagtttggctgtattgttgttgctggggatgtccgtactggtcttgccctggactgtactgttcgggtggataaccctgccttcgttcacggtatcgagatcggccacccgattgtgcgtgtcgagggtcttgcgcaggagctctttttcgggcctctctcctggctctgagcatgacttaatgcttttgaagaaagaattcggatgaaagtgcgttagctaatgttcaacaataattcaaattgatttgtagatgacgttgaaaagaaaaaaaagccccctccaacatgtcatgccgtgggttcctccttattaacaaataacactataataccacagtatccgcaactcaaaacttccccaaagaatagaaccttcgaccaatgacctgcgccaaaacacgaaatcgcgcatcccactctgcgcagtaacccaaaaggaaggcttatttccgcataaatgcgcgtggcggagtcaaaacacgacgatctcaccgcacttccctacctgcattggctagcgtaaagcggacagctttgggggctaaaatgtgaagcatagcctggaatctggtgtggccaagaattttagctgaaggagagtagctaattgcgtcgctccgcaattaaatcataacctcgtgtgtgtatgtcacatgaccgttctttttcctatgtacaggctccgaaatcattagaaatcaacgcggtgaaggattagtcggccaactctggcagaataatccaatcggcagaataaatatagactaggcccaatctagctagactgttaatatatagtcacgtgggcctctcgggcatgtcccaatggtccctacacttacgtagcattagaagtaagagtcagtcgttttgctctgcaacgatatctgggcggccgcaggctatccagattactagtatgtcatattccagggctgaccgtcgattttggaatcaataaaccttctcgttagaataaattaatgcccgaggtccaaggcagaatcaggcagaatcaggcagcagggagtggtcatatccaaaggggggggtggctgtatcaatgccccaagaacaatggtactccgtagccacttacaatggcattaacggttccatgggtcataaagaggaacaaggcacacgtaaataacaacaaacaccggccttccttatttgaggagcaaaaaagaacatcaccttcatctgcagcgtttgagctcatataagatatctgaataaggtcagatgaaagaaagaaaaaagaaatacaacttctcaaattattctatgctgtagatgccaagagttaatatataaatgccatgttccagtcgtcgacggatgacggatatgacgtatggaggcatgtgccaatgacgtagccctagcgacccatctacaggttatatgtcaactatgtgccatggctgaccacttttcatgaggaattttgcatagtccttggactgactcgtttgtccttgctatttgagacgggaacaatctgcaagaagccgaattgccggaacaatcaaacacttcatccgttcgaaacccacaaataaaagcatggccaacatatcgattagtgcccctggcctgagcagcggcgggtttctttacaacaatggcaacaataatgcgcgactatgcatcacagccgaaaccgaagatttcgatatcgagatcatcaagaactggcaggaggaaggattcgacgtcctatacctcccttataacggcggaggaaaagactacgctcgtcggttgcagtctgtaaaggacggactcggtgtaggcgaaaactacgccgtggttggtatgcacagaacttctctgaacatataaactccgagtgacaaactgaccaacccgattcctagcctacggcgacgctgcggactactgtctcgggtactatatcaattccattaacgccagtcgactctgcgccctggtcgcgtattaccccagtctaatccctgatacgcgatctcggttcccactctcactccaggtcctcgtgcacttggcgggcaagactgtggacgtacttgttcagcctgtcgcacttggtttgcaagggaagaaacgccgccagacacggccgatcaacgctggtatcgggactggagagcgtttggatttagggtacccggcgtttacgtatgataatgccgtgcccggatttgcggaaacagatctggaggaatacgatcgtctgtcggcggagctagcttggtcgcggactttgaaggtcctgcggaaggggtattccagggatccggattacgagcagcggtatgagcaacatgtggaaggtaagtttaaatcgcaaaaccgttgagccatggcggactaatactttgttagccaagtttttctcgtcgaacgtcaagaaaaccatggatggttacgttcaacacaaaacccctagtgtcacctacacgccgacaatcagcggcggcatcgggaaaaaatccttgcgccatttctatgaacattacttcatcggcaaattgcccccgtccatgcgcctgcgactgctatctcgtaccacaggatccgaccgcatcgtagatgagctgtacgtcagctacgagcacacacaggaggttccatggatgctaccgggcgtcccggcgacaaacaagcgagtcgagatcatcctcgtgagcattgtcagtttgcgcggggggcgtctttactccgagcacgtgtactgggaccaagccagcgtgctcgtccaagttggtcttttggacccaaagctgctgccaaacggagtccagggtgtcgaccgactgcccgttgttgggcgcgaagctgcccgtcgcatcctccatgaggatacggagcttgaacaggaagattaccataacaagatgatccgtcgtgcacgtgcccgcgcgagaaggagcttgaatcagagctcccgcctgtcccaggctggcgatgagtctgccgctgacctgaagagtgaggcggagcagtcattgcctgacaggagtcgggataagggcaagtcggttcagaaaaccaagcctgcaagtctgcagcgagcggccatggaagcggctgagcacgggggtgatgatgacgctaatacggagacggagactagtgtcaaggctaggtctgaggctgacaatcaggctgcctatgtcgaggatggggaaaatgatagtgctgagaatgggtctaagcagacatgacttctcactactacttccctttgtcatgataaccacgaagacattaccatagccttttctctgcctccagagattgaaggattttgttgggaatgttcttccgattttttaagcgactgtattttgattatcagtgatgttgtacatgtcgatctcttctgtttagcattaatgattatcactactgtggatgcgacgatgaatatgatttgtatgtttgaacagatattgcaacaattgagttgaaaattgaagctctgagataatgaagtacagcgccatcgaaggcaccaaagaaaccattatatatagtgtagcatactatcattagcaatcaatctgacttctgttgatcactccttttctcttagtcacatagtcagatacgcgtaactagttatcatatggaatatatatacacggattcatcgcggatactccaaaggaaatcatggacaaaaacaaagcctagttataagcatcgagtcatccccgaaaaatgttccaagtggctcaaagacatatttcacccaatatcacctcggctctagttaaatgatacggttcctgccattcacagttccagttcggtcgcatgtcctcgctggctttcgaaggtgcagaggagccagggttcaaatttaatgaatttcgggtagaatccatcatatcaccatggcatgagaagcataatatgagagaatgcgaaacataatggcacctgaaggtattaaatgacacaaaggaatacgtgacgagactttacaaggcataaaagacaaaaaggttgatgcgaatagagtttaccaagttcatcggacaaagtggggcaaagtgggacttagagatagggaccccatcattatggcctagtggtaaaatacgctgtattctttcctacctgtacgtcaagatattgtttttgtacgtgtacctaaatacaccaactggaaggtgatagatgagaagaagttcagggttaagattagaaactaagcaatagttagccaattgactaactcccgtttttctcaagttcaaatagacaaaaccacgtaaggcagggtctcatcaacgatccgtgggtgcaacttaaaaatataacctccacaggcaagtgtcccattcaactactgattatcgatttgatgatgccgaaaattgctgacctctcgccgacaacggtgttaccgataccaatcaatcttccccgcgccttaaagccagcaacgagtcatgaacaaaatcaacggatctgtttttcagaagccaaaagcacaagacgataagggtctaaaagagtaagcaaagtctttgttggttagatttctgggtgtcctaaggacgttcgttcaactgcttaccttcatcttgtaaaatgagacgagggatatggagtcatccactcacacattgtagaaggcagcgttgatatacttcaaacaggccctaaaacaaggactaatcaaaaatccttgttctgatttatgggcgtactggcctcgtgtttagaaacttactattgcgacattttgtctaccgagacgcctgatgtctagagccaaatataccgaatgaaggaataactaaattccctcgacacctcaatgctgacctttaatccagaaggcagttcaacatcgatatagatatatagaggcctcaaattgaaaagagggtatgagagctgcaggtcaggcttactaattcgaagcagcgcgttgatggcctgcatatgggggtaatcggtataatacgtatggaagaaggccatgagttgtaagaaagaaataatatttgctcttggtcggacatatctactctgaaagtttcgatagaacctttgctgtattagtatgttcatgaaactagttatagccagatacagatggacctgggctcccagaaactagtaatcgcgtgctctcaattctaacattacctacaatccatccattagtataactttaataaagggaagattggagggaaatcaccaagttccaagagggtgttttaaaattcagagggttagtcgattaggccctgcggtataagctctagagggcaggcgggatgctctacattcttctttttgacacatcgtgacttctcctaagtcctgctttttattctctctttaagaagagtcagtaacaatacattcgacaagtggaagatataatttatgttattttgctgagcgaaacgaagcaaactattatagtcgttcaggcaagggaatatactaggcctgatttttgagatttacgtaatagaagtagcagtcctaacggatcaaacattacaaaaaggactattcttcctcaaattttctgatctaatacacagacacttttcagaccaaacttcttctcatcatccgataaacacaaagcttctagcacggacaaggcctctgccgcaaggtatttgttctcccaggtcttttgaaaacagaataaccaacaagatcagatcacgtcaacatgtgcaagagaacctacagtagaaggaagcgggcttatgaaaattatcataacatacctggccatctggtctctgatggatgcaacacctacggggtagagactggcagaaactatagtattctcggtggtaccacgcaggttccttgcgattactgcaaggccaaaggcctttaggcccaaacagccgatagtaagtggtacgaggtcgcactaggtgggcctctgccatgatctacttttaagtatccttgtcagttctccttgtgatgcttcaaaatttcttataatctgaagacccttctagaattccttggcaaccttgaccgttcgtgaatattgcatagcgaagtatcgacaattcatgacctatgtagtagtgatgagctactacatgctgagttgggataacgcggcagtcattctttctgattgttcttgtgccgttattgagtttgtgttgttcttttggaaggtccgtgcccgcctcataagtgaggttggcgcggggatctactctattatctaccacgtcgcgccaaccattgtggtgaaaattggtgaaaactgttcatgccgacctgacccccgaagaaaaggaaaccctagaggaggacattttgatcaagaaatcgcgttcttcaagggtcttgataagcttcaagatcgatgtccagatattgttatatgctttctcatgctccctgactatctttttctaccatattgcacgcatgggccactcttcgctcgcttttttcactaccaggagcgggagccaacaataaatcactgggtagggcgagttatcagggtcaaggagtacgaggatcctgctctcgtcgctcggtagatataacaactcacctccgctcttgagtatgtagagaaaataggcttctatcacaatgttctacattcaggcaactgtcttctagacagtaacttgaacttaaaactaactgattttagctgtactaccactattagacaactgcttaaaaatttacatactccgtaggccataaaaatacttgctagaccgttgaaaggcacatacagtctttattctaccagaactgaacagtttacagtcgggaaacttctatacctcatataatatggttataaaccatattataacattgacaacagggaatgggttaacagtagagggtctgaccgatttaggaatatagagtttccagaacttaatcgcaatcaagttcttaataggcttatttctacttattggctcaatatctatcctacaatagccttcgtagcgtactactttaagcgcaagacaaaggatatggtattgagtctagaatacatccccattgactctgcaaaggagacaaaggcctatgaagcattgattcgcaaaggcttgctgggacctgagttagctctccgcttccagtcggcctagagaatatacctacatgcttttgtacagagaagtatgtttatttggcaatcttttctacaaagaaggttctggatctggtcctggtgattggttgctgatactttcaggcatactttgaggctttgactgtcctcatgcaattgaaagacttctctttgttcccttttgtagtgtttaggcctaccttcgtcttcatgaatatggcagtaattagtccgtcatcatcgattaatctgacttctgttgattttattctgcaagtattgttcattacgttgatcgcgggcttgctaacttactaagatatcagccagtgatgttattgccaaccacagagattcttcactgtactataagataactacgaatacgaccatgatatcactagtatttttgaacgtcttaagaaagagtttttcgtaatccaaaaatcaatgtcaaatgccaagacgctagccctatccagacccacataataacgttaagctaaagaaaaccttccacggtaccttttccgttttaaggttaaaagtttgtttcaggttcatttctcatgccacacttctaatatcgaccatctccttgtgactcgtctgagagtcaatatcacgtgtagccgatcggggagtcactaatgtcttcggagagaagatgttgaaggtgaccatagtcaagaacatcagagcagcatcaaagacatacaagtacacctctgtcgacatgatcggaccatttgtacccgtaatatactcaatggcacggaagatagaccgaatcatgataaacagactagccgtgtatagcacaaacaaacacttcatccacggcaccgtggtggcggatgtagaagtcccatcacgggctttccaaagccggtaatggaacacaccagcagtcacgacgaagaatccgaagaacgcaatttggataaaaagaccggcaatgatgatgtcttgtcctagagcaagcttagactgggtctttgcggaagagaggaagccgccgccagcacactgagcgaggaaggagacaacgtctccacagacaaatattttggtcagccagttgactcggataagagagagcttttcatgtccggtggagataattgagcggcccaggaccatgtagatggatgcggcgaagaaggctggtgcgagaaggagcaagagtgattgcatgatatatgggggtgttgtccaattggggctttctcgcgagttaagatagcgaccgaggtagccgatagcttcaactataagtaagttagctttatatctccgttctcgaataagatatatactgacagattcctccgataatgaaaggaatgaagaaccatgatcgactccgtatcatttgaaaaatgtgcaccagggtggtcaatccgaagagaacaacaaagataattgctgcaactcccgatgggttatagttgtagagagtgtaggtggattcgttggccattgctatggtttgaattgagtaaaggagaagacgtaattgaaaagtaagaatcgaatctaaaagcaatgttgactatgaagatgtattgattgccggccggacgctttcatatttatataacaattgcattgctgtgaattttctgcgagatctagtgctgagcccgaaaatctattctgggttcagatttgggttggaatccgagaagatttagacagccttgtttctagaagcttattgtgggtgtatatcatgattgtggcttgggacgaagttatatattctaggctgccgattaattttgctccctacttcgtcactcttgtagacatgtcaatctcgaaactgtttgaagatcaaagatccgaacccgaaagtccgaataagagtaaatctcggtctcttattggttgtaggaagcctcgtattcgtaactttatctctcgtattcgggtccgtgttattatgtagcctggccatctgcaggtgttgttcgatgaaaaagataaacttaagattactcaagatctatatcccaagtttaacatgtcaattgttctgcctgaacaagaaatagccctgttcaactcatgtggatcatattgagatgatccaaaacgttgatccaaaaacgagcccgtgtgatcatcatggagaacaccaaaaagaattagtctcaccgtggaccggagtgaaactaccctggtcatgcgtaccatggaagcagaaaactgaaggattgcaaaactacaagaaaggaccgccccctgcgattttctgagaagcatcaatcacagatttgattctgacagtcaaaatgcagcttctccttccctttgtcgggctatccctttcgggtcttgcatatgccaattcgagcagcgcgagcgcctcggcgactgtaacgggcttcctctccacttcttctggtactcttcaggtccccaagggagcttcatgtgcttgcgagaagctttctcggtctatgccgaaaagcataatcctccccggtgcgacaaactacacgactcagacagtcgataattactgggatattcgcgcgaatctttctcctgcgtgtgtcttcgtgcccaatactgctgctgaagtgtcgcaagcggtcaaaatcatcggtgcctgtgatgcgcagtttgctgttcgtggcggaggccacatgaacgtaagcttctatcgaatagaaactatgaaataatactaactctctactctacaacagtatcctggagcgaacaacatcgatgcgggagttctgattgctttatcgaatctgaactcgatcactgtgaagagtaacaccgtggaggttggccctggactcaattggtacgaggtggactcagcacttgagcctcatggccgtgtctgcatcggtggccgtatgaagaccattggtgttcccggactcagtcttatcggtggcttccactacttcaacaacaagtacggctacgccatggacaatgtggtcacatacgatatcgttcttggaaatggaactcagattactgtcaacaagactttgcacagcgatctcttctgggccttgaagggtggtgcaaacaactttggaatcgtgactcggttcgagttgaagacttacgatattcctaagatcagcacaactattcaagttttcaacgagacacacattcccgactatatctctgctgtctgcgaggcggctaagctggacgatgaagatcccattgcggcaggcatgatcgccactatcacctacaatgcgaccaccaaggtggcacagggctctgtcctcggtgttcaggagggtgtcagcagccccccatctcaattcgccaactttaccaaaattccagcaacccaaagaattaacaatgtcactactataaagccatgggttgaggtccttgactcccctaagcagatgatgcggtatgtaatctcgcctgtattgcaattttcactttactgattacttagtgtccaattctctcacaagacgatgaaacccgacgcggaggttctttattcgatttacaaggcttggaaagccgcagtcgacaagatcgccgatgtccagggtctttacccgacttttgtcatgaatgtcatttccccgacttcagtccgcgtggccaagaccaacggtgttggtaacgtttggggtctcgaagaagaacctcttattagtaagtccttccaaacttagttcggttgcgcttcttaggcttaccattactgtacagtttggcaactcagtaccggctgggacttagcccaggatgatattcgcatggaagcttgggcacgtcaattagttgagcaccttcacggtatcaacaaagagctaggtcttgcttctgagttcatctacatgggtgatgctggtgagtggcaagatccttatgcgggtttccccagtgagaacgtcgctcgcatgagaaagatcaggtcttcttatgatcctgcaggagttttctccatccttagctggggtggtttcaaattgggtctgtaattaaacctaagttgtcagcttttggtagatctggcgatacgtccccttaagtgacattcatatttatcgtgtttatagaatctctatagaatcaacccacttcgtaaccatgagatcttggttttttgatgacatagtcgcgacgtcaacagcgagggagttaaactactagcatcaacaatatatcaagcgaggctgtcagagccgataaaattctcgcggaatgatcaccggccaacctcatacattattgtcaccaattatttttgacctgtcatctatctggacagaacgcacgaataatgtggcagtatttatagcttccaagcatttccaagcctttctagaggcgaacagccgttcaatggaatgtatagggagtgcccacataccacacgcgatcctagatcaacatcatatggacccttcgggaatggaatgtgcgatcagacaaccgattgagtgaacatgggattttttgacacttgccagcccctgagtatgacgcagaagttgcattcgaattttagatacgtttcatgttcagcatcatagccattcttccccgccatcccattatcgcggtacaatcgtataagaagaatttgatagggcgcactaggtatataagagcagtagatgcgcatcttgctgtctacgctttgcaatcacacagttcaatttgatcatcaaactataacttcactgacattgaatcttagcaaccatgcattccctcgccacctcattcatctccttatccctactatcaggcgcagtccatgcccaaagcatcgctcgtgtctggacacacttctacccaaactgccctggcgagacattcagcaagctggacacatacgaagactaccaagaatccggcccatcccaagatatcaccttggacagctgcaaaagcttccctgtcccctcctacgagcacaatctcgtcagcgctatctctgttgacgccgagctcctcacccacaaccacgacctccccttcctagaaggcggcagcggctgcaacatcagcgtgcacgaggtcccaggctgcatcgacccgcccctaatcaacaaagagatccgaaatggcgtcgaagtcagccattgtgtgccgcgccagttagtcgcttatagccaggtctgggtgaattttgtctgcggcagcgatagccctctccacaacgagaacattccccagacgacagaagagaacaagcaagcagacaccaagcagtccatgcctactgctgcgcccgatgcgcctgtgcgtactgagaaacatacttccgtcgaggatatcaataatatccagacgcctgggtcgaactcggattcgtggcgtacgtcccaggttgtgaataaccagcgcgagccggcgcaggagagccgtgttaatatggccggtcatgcgcagagtgagcagatcgttcatcagatgttggagttgttgaagaacaggacttcgcatatcgtcactggcaagcatcatgctactcacttgaatgttacactgcatcacaatggcactaccccaggaaaccacactgtgatgtcacgtcggcgtctatctgttttgcgagatcgggctggtcgttttgtttgaatttgttttgggacgtctgtctgagcgtttgatttatgtttgatgaattgcaatcatgtgtgtataccgatcaattaaaagtctactgtgtatgtgaaaattgcgcaattccctaacccataatactacataatagtggacatagagaatggatgcgatattcttactcagaactcaactcaaagtagtgtaaaacaaaagcttcaataggtatggccgaagcaaagagtctacaggattgtatatcatttctggtctactgaccaaacgaagtgatattttgtgtcaatggtagacacacatcagactttacaacagcaagaccttttacggtcattccgacatgggtttagcaaatttaccaacgcgtagtcatgatcccaagttaatattctaacttgtctcttcgtcggtatctgtagccgcctgcttccgactggcagcctccttaccagcaaagctgaacaacatgcccagatcatagatcactttcaagcatccagcaataatgaaggatacaccgaaatggccattgcgcgacaagatacccgtcaacaggggacccatgctctgcgcggtagtcttcacaacattcaccgcgcccatgatagcagtgcgatttttcgccggcagagccgcggcaaggaatgcggagcgaggcgccacatccatattctgggagcaggctcgcagaaccaagaaggtcagtgccagaggcaggctagatgggacggagatgagagccaggcagattgccgacggcaaatgagtgaataccatggtcttccaaatgttagaagtcgctcagctttcccgagtgaagaatatcttacttttacattaccaattcgtttggcgagggacgaggcaatcagcatggatgctgcggagatgatgtttgtggtgaagaagatagtgccgagttcaccttcaggcagattaaacttgcccctgaagaagtaggtcatccaggagctgagaaattagcatcgtagccgacaagagttgggattacactcacagtgaagctaatccagatgcgaacgagtccactccaaataggatgaagagacggataaccagcgaccacaggtccttctcgatagacgggaacagccacttcttcctcgtggccggctcgatatcccgcccgactgcttctaccagcagcggttgggtttcagagatctgctcctgcggctcttctttctggacctcgaccttttcacttaagcccaaagtgaagattaacttaacgacgccaacgccggcatagacgaagaaaatgatgcgacaggcgggaatgaattcccatccgtggattgactccagagaattgatgatccaaccacagacaagcattcccatggccgagccagcagttccaatcaaggaataccaagcaaagacatcactcaaaagctcatgaggtgtgagatgagccaaagtggattcctccacggcgcggaacggaccgatttcatttccactaagaaattagctgagataaaaatagaaagagaaaaaagggtcgaaccttggactaatgacacccaagactgcagcggccagtagaacccagaaattcccgaacagcgcgaaaatgactccgctaccagccatgagaattgatccgagcgacaacaccgccttgcgacccatagcatcagcatacagagtgaggaagaagctaatcacaacatctccgatcagcgtgagcgtcataaacaagccaatgcgatcatccgaaattcccatggccgacagatacgatgccagaatcaaggtcgagccgccatacgcgaagaggcgcacgaagcgttgggcgcagagaagcttcacgtcgagcgatgaccgccacatagtggttaggcccagctcttcgaggacatggcccatgtaacgcgccggtcgcgattgattctccattgtttgatggttgaaggaagaaagttgaaacaaccacgttttaactccgaatctcggactcggcgttcctgccggagctaagctttcttaggagagagagcctaaaagggctgaagaaatatattaactcttttgaatataaacaaaattattatgtacaaaggatattctcaatcactgctcagtcttgggaggccatttcactcgtcgttccgcccgcacatacaagttggtaggacggatcaactggaacatgggatcatactcgactgccccatcattctctttcgtgaacttgtaccggtataacaacttgggcaagaacactttgacttcctgtaaggcaaagttgaacccaatgcacatgcgcggtccggcagcgaaggggatatacgcagtcttatgacggttcttgacctccgctgtatcccaacgatccgggtcaaaccgtgctgggttagaccagactgctggattgttgtgtatgtggtgaagggcggggatgatgatggattcttcggagagcttgtatccgcctgggagaatcatgtcgactttggctgtgcgcgcaggctggtatgaggggttatgacggcgctgggtttctttgatgaacttgtccaagaatgccagacggtccgtcagatctgcggtcattggggtatcggcgtcgatgtcgttgtcaatcaattcctgtaggagtctctcctgcatgccgggatagctgactaccgaataaagcagccacgatagcaatgagctggtagttgtgaaaccagcgcccgtggctaccactagggcctccatcagactggtcttaggcaatttctcgcccttgttatcggttgcgcgaataatataatctgcctaggcgttagctcaagccttgcaacttctagtcattcaacttaccaatcatgttggaggcctgcaatgcagcatcctgcaacgggagatcttcgatgccattacgagaggcattttgaatagactcgttgaccatctcaataatacgatagcgagcgtcccgtagacgttgcgggtcaccgaaaggcaacttggcgtaccaatcaccacgggcggtcaccttcttgttcagctccaaagactcagcaattcggtagaccagttcgtggggtggtgcatccacggcagagaaatgcttgaagtccataccgagaaccagctttcccacggcctgcgcaccgagcttgagcatatatgggtagacgttccaagcctcgccgcgctcgtctagctcgtcgaacacattgaatgagtcctcgacggttgcttgcatagtgggagcgtagtgacgcactgctttcggacccagggctggcgggaggaacttgtgtgctgcacgccattcaggtgtatcggtgtcacccaaaaacacaccggcctgttggttcttgatcgggtacaaagggtgtgcctcgttgatttttttggtgaagaaatcagattctgcaaaaacaattgcggatagcgcggggtcattggtgtggtagactgtccggcccatgttggtggtttgaatgataggtccatattgttcgaatagacgctggtggtttcccaagtgatcggggtaaatctcgaagaagtttcccacgaatggcagtcccttgggaccgggaatctcccgtactgccttaccatctattgagatggcgatgggcccttcgttggtaaggatctcagagggggtggacaagatcgaatcctctgactgaaatccgatgcctaacttgagagttaggatgataccagaggcgacgcgataaatgcttaccacttggctcaacgatggcaaattgaccagcaataaggtgctgaagttcttcgtagtcgactgttgtctctacctcgattgggcgagctgaggtgatagcctcgcccaacaagtggaaatttttggcaaccatcgtgaaatgggaatgagaataataacgtgttctttctctctggaagggccctcctcacatttataaggatcttattatctgggccatttgaaactgcatagttgactccactattcatgaaagcgcatcccgactcattttcatgtcataatgaagcagatgcatatctctgcgagcctcggttcaaaatatttctcaaattaggatccacagtatcatcagattgcaaaaataggagaatacaacatagcgcggacgttatttcggactcgctgtgccgatggcactggcgcgaaatgtgccgtctcaaacggccccaccgtcaagatagaggttttttttaattatttttcttcaagatgccgaggcattttcaatccctccttgctggtaggctcgttttatgcaaataccggaagtgctaagtgggctattgtgataattccatgttccagtacggagtcctcgtcgtgatattaaattaagactccgtcctttttggtttttgcaaaatcattcattcacaatgtccgttccagaaacaaaagagctcaaggtcgagctgccagagtatacattgaaagatgtggcagcacataacaccaagggtgatacctggatggtgatccacggacaaggtaacttccccttaaataatcaaaaagacggtgctaacattacgacagtctttgacctcacaaaatatctgcatgatcacccaggtggtccagaggttctcctcgaggtagccggtactgatgccacagcagactatgaggatgttgggcattctgaagacgcccgcgagatcatgcagcccttcctggtgggcactttgaaggatgctcatcagtacgtccagcctaagacagtgcgtgtggtctcccaaaaagcacctgaagtggccaattcctcatcgtcgaccatcaaaacgatcgctttcactttgggtggactggccccagtcttttacctcatcagccaaagaaacaatctcacaaagagcctgggagccatctcccacttgatccctcacccactgaagaacctacgactacctcacgggggcttcatcaacggcttcttggccgcttctgctatctccacagtcctgggtgtaatggtagcgcgacaggccagcagattcaccaagatcgactccgggttcatgcggttcccacctcataagaagtcaaagaaggtgcttcgtgtcgatccgcacctggcacgcggcttcctcgacccgcaacattatcaacgcctgcatctcgttgaaaagaccgaactagcaacgaatgtctaccgtttcgtctttgccctgccaaccgccacaggtattttgggtctacccattggccaacacgtctccatcagagccgttgtcgacggagcgagtattactcgctcatacacccctacctctaacaacctcgaccggggccgcattgaactcgtgatcaaatgctatcccgacggtttattgagcgggaagtatctggccggcttgactgtcggcgaagaagtcgaattccgcgggcccaagggctctatgcgttatacgcaaggtctttgtcgcaagatcggcatggtggccggcggcacaggcatcacacccatgttccagcttatccgggcgatttgcgagaatgacaccgacacgacggaggttagtctggtttatgcgaaccgcagcgagtctgacattctcttgcgcgaagagcttgaacgcttcgcgcgccaatacccgaagaacttcaagctgtggtatatgctagactctgcgcccgagggctggacctatggatcgggatacgtggaccaggcagttctggcaaagcagctccctgcgccttcgccggacactaaggtgatgctatgtgggccgcccggaatggtcaatgccactaagaagaatttggttgcgttgggctttacaaagccaggggtggtggggaagatgaccgatcaaatattttgtttctagaaaattgcctaatatagtaatagccgaggtttatagagaattgagtcaagtgttaaattattgatcacaacttacgacccgtccgacggccctgttgccgaatgcgttcgggtgtccgaagagggcaggtctccgagagatcgccgaaactccactcgccgaagtgctgattcccgagacgttgactggctgaatggttgaagcttatcttccaggaaacactccataatactagtataaattatgtacacaagactatgttctccctcccttcacttcgtatcatctgtcttcgttcctttgcgtttgcttcgacgccggtgagatctccggcgcttcttccttggtttctgtttctcccgttctcgaatcatgaagcgaacccttcggcctaatcttccttctcttgtctcgaacccagtcttcaagttcatttctgttgagattctcacaagaggtgagatgttcaacttggtatttttcgagcctgagtatcgaggaagatcagacgatatagtaaccgtcttctttttcttcgacagttgatcgtcagtaggaggatctggaggtgtagggtcttccgtatcaggtagaactttggcggttcgctttgtcgatgcccgggactgcaaacgacatagataaagatagtataagagcagtagaaagactgtagcgccgaggatagaccccgctattgcacctttgctttcatctgacagtccattgcttttggtcgagtttatttgctcgggcgcaggagttgctgctatattgaccacctcgatgacagtcgtgaatggagtggtcaccgtcaatgtcaccaggttcgacgttggccatgacttggtgttccccagagtaatgactgacacgaaagtggtgtctgcttcgattactgtctgggtgacctcgcgaatcgcaggcgccattgcccggcaacaaattgaactgacatgatgggtttaagtgtcagtgacagcatcacttatttcgcgccacaaacacgtagggtatgcacgagcgggtcaaaacggtcttctagtatatgtgataacgaaatcgaattcgtgataatcgtatcttctgactcagttatgcagcttgtgctgcgcagtcacggaaatatcactgcaattggtggaatggtctgcaagtgtggttggaaggccagctcactgcgtcttggcgcaggaattctgctgagcacggaattaagacgaacacctgcgtggggttttcccaactaatacttacagtttatttgccaagtgctgaacacccacgggttctcgtcagacagacatgcagctttacctcgaatcaatttcctgcccgaaaagaacgagcgcagtgtatggtcgcctcgcccgcacggacgaattctctccatactccacacagagaggccttggctcttcaactttgaactcatattattgaagttacgtgatataaagcctctatagatttacagcttcgcgcttccaggagcaaagttcgatccagcgccctggctaatagcatcaacgatggcatcgacactatccaaaatccacgtattcccctcatcgctagccaaccagcgcgcagcctcttccccctcgacatcagtcgcccacgagccatcctcgatcgccttgcgcaacccaaacaagtgcgaggtgacttggggtgcaacgccagactgagcgcgcaagcacgagacagcaacaacagacgtcaggatccgcccaacggacgcgccagtgctacgctcaggatcagacaacagggcgccgtagttgttgtacaggatgtgcaccggcagatcggggtgtgagtcagctagtttattgaatagcttcttctcgaatggccgatagatggaattccagagcgcaaggccgcgctcgctgatcgcggtgatattctccggggtggggatgcgggtgggggtgcgggagagctggctggtgactgaatctggaaggctggctttcaaggcgttgaggcagtttatggtgcgtgggataccgttgaaactaatgcattttagaccgacctcgcgcatgagctcggccgtctcgacttgcttgttcgggttggtgctggctagttcgtagagggctgcgagggactcaggggagttcatggttatcgttgctgcagtctggcatttgttagattgcgttcaatcttaattgaatgaatcgactcactgatagtgcgacccatgatggctgcgagagctgtttggattgtgcggtctgttggatcttttggtagaccgaggttatgtttgctggcgcaggaatggtggatggccgggcagcaggggccttgattaatgccttgaggctaggtgaaagtttagacatttcggatgatgagctcttgtgctctgaatgtggatgtcttgccattaaatacaggatttgctaaagaccaattgtgttcccgacctcgggagcttcgggaacggaacccagaagtgagcaccgataaataccgggagggtggtaataagacagtaaattacttaaacatttcggtaatattacaggtggggaacacgtcgaaatccggggaatacggggaaacaaaacatccagacgcgatcttatggaagctctgtcattggtgaggatctgcgggctggtgaggaggtcggactcagaaatgcccaccgaagtgtctctctctgactgtttctgggctatttctttccattattttcctattttctccccatcctacgctgcggacagtacaggagaataatatcattcgtactccaagcaacaatccaagtcgccatggaccaacccaagtccacagtatcagagctggaagaggcgaagtcaggtcccctcgaccgacattacgaccttgaacatcaacagaagttgacacggagggtattgtggaagttggatatacagtcagttcaagcattacaattaccatgcgcttgctaaattttccagtattcttcctatcctagccctgcttttcctcatgtcatttttagacaggaccaatgtcggtaatgcgaagattctcggcttggaagcggacctttctatcacagaccatcagtatgatatcggcctggctgtgttctatctcacctatatttgcaggtgcgttgtgttctgttggacccccacgtcagaggctaattgatataaagcgaactgccgagtaatctagtactcaaaaaagcatcgccgaagatttggctgccgttcctgacggctatttggggtatcattaccatgtgcctaggatttgtacagaattttgctggttttgtcgtcgttcgggctttgctgggtatcgcggagggaggtcttctccctggcatggtatgtttccaatgttgaatgaaattgacatagttaactaacaaaaggaaaggttttatatctatcttctttctatcgacgaggcgatttggctctgcggatcggcttgttctacacagctgcttccctgtcgggcgcatttggaggtaaatattcatcaatctcactggttttcggcgatagtaacgaactaggacttctcgctcgtggactagccgaaatcggtcctcgaggaggcatacaaggttggcgctggattttgattatcgagggacttttggtatgtgaaggtaattgctatcaaaaacaaaatgctgtctgactgttgattagacgtttgtctccggggtgtcgagtttcttcgttcttccaaatagcttggaatctgcatcttttttaactgcagaggaaaaggaattcggaggtaaaaggctaatgcttgataatcccgggtcactagaagggtaagcttttctgacccgttggatgggaaagcttggctaacctaaacagatcctcggaggcagaatcgttcagatggtccgaagtccgtcgaggtgtgctagatctacaagtgtggctctctgcctcggcgtactttgccattctctctgggctatactcctttggcttgtttgtatgacttccctatttttacatcggcctcaagcactgacggttttagctgccaacaattatcaaaaacctcggttttgccaaagatgccaacgaggttcagttgtggtctgtgataccttatgctgtcgcagccgtaattacaggtttgtctacagagcacctttgaatttcatcaaatactcacacagtttttcagtcgttgtcgccatcatctctgatcgtctccgtctgcgaggcgtggtgatgctcttcaccctcccaatcgccatcattggatatgcagccatcgccaacattaactcccctcgcgttcaatacggcatgaccttcctcatggcaactggccaatacgctagtgtgccgtgcatcttggtgtggttgtcgaacaactctgcgggacattacaaaagagccactacatcggcgctgcagctggcaattgcaaatgctggaggattcgtttcgagtaagttgcccacactgaatttatttctagatcactgacatcactatagctttcaactatccatctagagatggacccctcttccaccgtggacataccattatccttggtttgttggtgtttgcatggtttatgtgggtgtatttatcattattgggtcaagggcgatcgctgatttacataggatcctgtttaatgtgctctactgtgcaaagatcaatcgagacaaaaggcagggtaagtatgatcaatacgcagggtataatgatgatcgtaacccggagttcatgatggttctatgatggcaatgttgtctatagacatattgatgtgctctacaatatactgattctggttctgggtaattgtagcaagcttaatttttagaattcaacgcattattctgcataaatcatctcatacccaccactgccaccagtgatgaggcttccagtcctgcttagttgcaccacgcaaatcatctgtatttaacacgtccacaccctcatgcacaagtacattccaaacatgattccgcagtccaatgggccaggtgggagttccccagtaccgcaccttcagtcccaacttgtgagcttcaaatacttggctccgaagaatagcaagctggatatctgacagacgactaagagaaagaggcccgataaccttgcggaagtctgctgatgcataatagctgttggatgggttataggtagagtccattggtttgttgtcgtttgccgttatctcggtgggaaaggtcaagttgccaagaggtgcatcaaagaagacgtcgcggtaggttgtgttctccaacagtaggtgaaaaggcacatctccactggcaacgatagtaactgggccgtatacgatatcagagccattgaagtgagtcagatagcccttttcacgaaacgggttcagctgctcaacaagaagcggcaaggtgcgatcaccatcggttttgcaatcaaccagcaaggtcacagtctgctttgggtcattaggaaacaccccgactatttcctgattcatgacgtgcggccagcttcgggaaggcggtgcattgtgtgtgtcgagtatcttcaacagcgggtcaagatagaggctctgtagtgtgccccggtggactgtggaacgtgaatggccgactagaatgtcatttccccatggccagacgtcagcctcgacgctgatacagcctgcacgaagtgctgagcgtaggggaatgtggcgccagtaatcgttgtgcgagtggcatggtacagggatgacaccgttggtagaccagtcggaaaaccttgagtggcgttccccggggaaaatagccaacgaggtgtcatgtcgaaagagataaaaaacccattgccatgcaacgatgaagagattgatgataccgctgcagtgagacattgttagcaccaacaagcacaacgagtcaggtgtggggaacacaatccaacggccaacaaatcacgacggggtgtagacttgggcagcaggtacgcacaagacgaaaatcagtgcccagagaggtcgctgcactacgcgacagaaaatggctctcttagagcgtggatatgcaatgcattctgggtgcgagcatttcaaaatcgagaaagagggtcgtctgggcttcatgtagggcgatgtatttctcacttcgagatcgactaagataaatgcttcatgctccggaataggctctagagcagatggatcaaaggccatgttgggagggaaagaaaaaggacaagctttttccaagggctgggcaccggctaagcttattttatgaggcttatcgggtccaccccaaaatacgtctgcctaattatggtgggattgtataacttcgaaattaagcgaaggaataaatgaaggatgtacaggctatttataggagacacgagaaaagaacgctctttgtctcatatcatgctcggtgtcggagtgactttattccatgatctcaagtgtatcggcaacggtgaacttggcatccgtcttgctttgtacttcttccacctcaacacccggagcaagctccgtcagtgtgagttctccggtggcccggttcacctggaagacacactgtacttttgtcagttttggttggcaatcaatcagggtcgtcgcacttaccaggtttgtaatgatggtgctaacaaccttggcaccagtcaacggcagagtgcacttttgtacaatcttagacgttccatctttagcgacatggctcgtggcaaccacgatcttggtcttgtccgggttcgagatcaaatccattgctcctcccatacccttgaatatcttgccgggaatcatatagttggccaggtcgccattggcactcacttgcagcgcaccaagaatagacacatctacatggcctccgcgaatcatgccgaaggactcggcgctgtcgaatgtggcggctccaggaaccaaggtaacggtctctttaccggcattgataatatcgctggtctgagttagggaaagttcaggtcatcacatctgggaacaacttacggatccagtgtttcctccgtgggataatcaccctgaatattgttagaacggcctacgtaaaaaagacgtagaaactcaccattcccaagataccattctccgactggatccagaccttcacgtcctttggcaagaacgatggtgccaacgtgggaataccaacgcccagattcacgtagaatcccggtttaagctccttagccgcccgacgagcaatcagttctctctgaagctgagccgcacttttagtaggcccagctacagagggctcctggcgcaacttcttgttttcaatgtgcttgtcgtccgtggcaggaacgatccgatccacgtagatacccggtaggtccacgtcattagcatcaatagcgccaactgggacgatgttctcggcctccacaatagtcaatgttgcggctttggccatgatagggccaaatgctttggtagtatatctaatcaatgttagtatccaattctaggacacagactggtacataaacttaccggaacacgcagttaccagcctcgtccaccttccaggctctgagaatagctacatctccggtcaaggcttcttccatgagatatgtcttgccgttgaactctcgggtctcgcgcgccttgccagactccagaactttaccagactcatccatgcgaacggggatttttccctcctgaataaaagtgtcttctcttatcagcgacgaatatcaagaaacataagagaagctatacatacgggctccagtcggggtatagaaagccggaatgccagcacccccagcacgaagacgttcagccaaagtaccctgtggacagagctcaatagccgtgtgtcccgtcaagtacttcttctccaacgccttattgttcccgaggtatgaaaggatcagacggttgatctggccattcttcgagagtatcgaaaggcctcccgccgcggaaccggcattgttagaaatggccgtcagggagtgcaattgatcagcaccccgacggtgcatagcattgatgatggtttctacactgcatatcagcttcgtagttctcacgcaggttatttattcatccacataccagcgactccgcaaagaccgaacccagagctaaggatcgtcgatccactcttgatatcggcaacggcggcatcggcatctttgtatagctttgagcggctgcgatcgatcttaggtgcgagagttgctgatggtgtggttagggagtatctagtggtgctggtactgaatggctgcagggggcgcacgctggcgcggacaccaatgaacagtcgcggtcgacacgcagtgagcgctttacgcgacaaagtagtagatatcctaagagccgacatagcttgtgattgtttagatctaaagaaagaagaaagaaggcaaaaatgaaatcatcgcgttgttatatcatcgacggcattggtcggggctacttctagatgccgagcgcctccgaaggttccccgtgtgtattatctatgacgtcatgggtatccactaaacatcaatatcaacagacccttaatcggcccactacttcttgaacagcctcagcttcccctaaatacccgcacgttgccgacattactctgctctgtcaaagaacccgcattggaaaccattgtagagatgggcgcgacatggccttcctcaggcctctcaggtttagacttaagctcttttgattcgtttgtgaggtttgcgcgtttcaactgtaatgtttatgccaattgatcacagtagggattgtgtataaaaaatcgtatggttgaagatgtgactccttcatacttgtgagagaggacgatgatgttggccaaaatggccctcaaggatgatatgctaaacgaaagggtatcaagatatatattgaagccgataataagaatacgttcagaaaaccaatgtctgatcagatcaaggcaagagaaactactgaagattgaaatccgcattggcagagtcgagccaatcccaattaagcatatcatcaagaggcacatccgggatcgacgcaccaaacgccgtgcccgcccgattgactgcatcgacgatctgatcatcagacatagcagagaattgcaaaggctcgaaccagaggtcctcaggtattgccactggcagcggacgatcatccagacatgcagactgaaatgcctcggatggatggacttcacctagatttcctcgggattggagagggaaggctggtgcgcgccggatcaactcacgcaagaacctcccgtacagcacggaggcgccgcttcggtgacttggtgttgcgccgattctctctaggacgccggctgtctcttcgatgaggtttcggacgcttggtgctagactggatttgctgtcgccgggtgttacgctgagactgagggcggagcaggcggcgaaggagatcattatgacggtgttgtttggcattgatttcaggcgagattcgccctggatggctgctcgtaggacgttcagtgcagatgatagaccggcggctcggaagaaacgtttcacttcgattggagctgttcggtggttgatgacaccaccgtatgtggataattgagtatgcgtgacaagaatctcgacgtaggggggtagagagcgtgcttgaatggttaataatgagtcaatcaatgtctggtatatgcttactgtctccttccccaattgacaaggcccatgttgcataccaccgctcgtagaaagtttgaatggttttcttgatcctgtgatatggtcagtatataaatgatattcatcaagacataatatcatacgactgagcagcctccgagccggtatcaacgatgcgataattatcacagcttgatttaacattctggaatagtccatcctgaaatcgttagaatggaattaatagcctgatacgggcatctctgatggattttgagactcgggagggcacctacaaggtcccttcgaagaactgccacggaactcataggaccgtcacgcgggtctgcaatgttggaaaggtgccaacgatcgcagttttcgatgagcgttgttgaagggaccgtatagcttcggccacgcgcaagacaaacactgaacaagttagtgtcagactcaaatgcaccactaggggaaaacgtaccctctctcaacgacatacaacgcaatccaagctctttcccgtcttcgcaacagcctaacgccccattccgaggacgggtcaatatcatgaaatccatccatgtgtaaagccctcttagcgtcgatgcactctgctcgcgccaggcgattcataagttcttggtcaaagcttgaagatggcgagataatcttgttcaaagataagtcaagagcaacagtgagggccatggcaatataggagcaagtatcatcgtctcctagtctatcgcctggagacatccatggaacgttcaccatgaaagccagaacaatctcaacagatttatagcgttgtgtgatcactcgcttcgcaagccatttgcaatgccttgataacctcttagataaagcagacgcagacggcaaaaatagggctgcgcctgccattatcgaagtaaatagaaaagccgactgggaccgcacaaaggatggggtatgtatcaagggatcgaggccccatcgagtatgtgcgagatgttgatagaagcttggtttgtcagttatcatttagatatgtttaacaataaagaccagactacttacaacgagaataaggactccgactcatcaaatgtgaccaagcccaacccaataggatccatatcaggtccaacatctagattcgctcccgcgggaacaaaaaaggatttggcggcctgttctccctgggaagtgttctgatataatgacgggccctctgacaacggcagtggagatactggcgcacgccgcgtcccaactggcgaaatctgaagatttgaagctctagcaagcagctgcagaggattttccgcatcatccagagtaagaccatcttccgcttgaatatcacgcggagacgtcatgcgcgggcgatctgatgtctctgaaaagcgacgctcatgctcatgctcattttgcattaactggccccgggcttgaccaaggagatcctggaggaccgaaatggctctttgggcctcatcgtcactagcagagtcgaccttcggccgcttaattgcctgttcgatctgatgtatcgctttctccaggccttttcgtttgctaagctccagtcagtattatattatactccacaaccttacgtgactcgactcacttttttacccccttttgtcgacccagatgatggttgggcacaatacactccgcattggtttgcttacatttcccgcagctggactcgcctgcctggcggttgcagcggatcttgctccgtcggcagtttaagcatgcggcttgttttccatgttggctagaggttggacctgccgactcgagctccatgaataagtgttttgactgaagtcatggacactaagggagatgcgggaagtcggggacaattagcgatcagtggttttggctcatgtagcgtaatagggctgcctattccctatatgacagtgtcatatacagttatgcttctcaacgggctgcaggatgcgctaagaccgccacctgcatgtctatattctaccaaagaccttgtttccgtccatggagcactgtttcgctgctctcttcaacagcccggccgggctagctcaatcggtagagcgtaagactcttaatcttaaggctgcgggttcgacccccgcgttcggctattcctaaaaccaaacctgagatttcttttttgctcttttctttttggaatttgttgatggaagagcacattgatcggatcaattgatctttttaatttggtgcgaatcattttcgcttttagctgctcactgcgtagtgtacaacggtgactatatatgtctacaacgttatgtctttcccaattcaattatatgtatatctatagtgacatttatcgatattcactgggtcattaggcgagttatggctcgagatgatatcctgatttctgcaatggctatgtatgaatgtcataacaagtgggtggtatcaattaaagattagtagctaaatataagctcgaaaacaagaccgttggtatttccatgacttaaaacgacagtgcatatagatccgaatcaacataacaaacgatcacatatcatccaaatgaagcctagtgaacgggaccagcctccacatcatggcccggaagagcaccagaagcctccggagcagcatgaggctgagctggagcctgagccatctccggaccagcagcgggcgcaacttccgtcgacgcagctcgcgacggcgcactagtaccggggggagtaacatccaacaaccgcggacccgactcatcaggcctcttgctcgccttgaccgttgcaggagccggacccaagacagtcgggtacttgaagcggaaaccccaagcgaagaacaagcgcatcttcgtccagaaactcatagcatcccacctcttcttaaggatcacggcatcctctttgctgcgggcgcggtagcccttccggaaacaaaacagacagaaaagggaaagcgggagcagaatgaaagaccagaaaagagggaagccccggcgggtctgccagcccgtcatgagacgacggaagcgcacccaggcctcgatcatgcccaagatgaagacgatgccgatccagcccagtgcgcagatcaggacgattgcgaggtaggagatgccgatgccggatccccatgtgctggtgaaccagttgtagtcgtcgtagtcgtagtcgtagtagccagatgatccgccgctgtagccggtggttcctggtccgctggacaggccggtgtagtatccggagttgccgctgtagtcgctgctgtcggtgtactggcatttgctacctatgtatcgcgaggtaggggcattgtaggagctcagagagctcagggttgggctggggatctgggtgggttccacgaatactatttcgtagatgtaggtggtggtctggaatggctgggcgctgtcgactgaggtcgaggttattacattgtccctgggtagcaaggcggcgatctcatagggcggggtgacggcggcagcggtcgtgatggtccattgggtggagcaggctgtcggggctgagaatgtcaggttgacctggtagatggtgctgtgatagtttccgtcactatccacggtgtcgtagccggcgtcgaaaccaagcgccgtgccatagccggtgggatacagcttttcgacaacggtgtagtcataaatggtatcagtggaggtaatggtggacagggcctcagctggcaaagttgcagttggagtgatttcatggacctcagtgaccacctcggaatagtaatctgtagtaacgtcttgctcgtagacctccgtcacaatccaaggggcagcctgaacgcaactcaaaacgaatgacaagaaaagaataaacgagtgtgaaggcgccatcttgagtggtcctggggctttgcagggaaaacagtcacaaacgagggatccatggctttaataaaaaaaaaacgttaatagcgcctctgaaagaccctgaattttctggtcatttgggggcgctgttgtcgcctaagctatactggttgaaagcctcgggtggaaattgccagctttagagtaggcagatgccccgatgtgattggcgatgttcctcaattgccagagcgaagtggaggttctagtctgtttacgctctagtccctggaccctagccttttcgcctcacggactggtctttttttggacttttgtcccaaggttagcatggaaagcacacaaaatcggactagcccatgcatgaaaaaaaaaatcttcgttgaatacaaacagcgcagaaaatacaagcgtaacttcgtggatcgtcagtgttgcaaagtccagagatcgcgaggaaatctatataggggattgacagtcccgtaaatccggaggtacccaggaggaaaaagaaagcagaactgatttgctcaattagcagcccgtaaagcccgtagcctggcacccaaaccatcctcggcctcggcatccacctgcttaggctccttaacctcctccttaggcgcagcatccgcctcgaggttcaagcgcatatcaacacccgcatcatcagccagctgttccataagtcgatccacatcggcctcgccctccgcaccgtattcctgcatcgatataccctgtgcgacatcctcgatcgcactactcgcgatcttgaagtcctccgaccgggcgaggaagttgttagcgtgcgagacgaggtgttcgaggttgacgctccgcgaggcggcgtctaggccccgcgacgccatagcgagcgtgcgggatgtgtcgcgcgtgctctgggcggccttgagttcattgatgatgacatcggcgcgtgcggcttcggatttgagcgttacttggcgtcgcttctcgcgcacggcggaggcggcgtggatgcgggcgatctggaactcgcggtttttcatcgccttgtcggctttggccttttcggatttgaaggtcgcctcggcccggacggcttctttctttagtcggttggagtgtagctggggaagattagttggtttcatgcatgggcggggtcatgcacggtgtgaggggaacagaggaggcaacttaccttgacatttgtgcgggcttcgaagatagggtctttgcgaaccatgatgtcggttatagataatatagaggatgaggataggtgttgtggaaggcagatggatttgggggcgcgtggcaacgtcactgaccgcattcagtgtattcttagcgtcggaggtcgagtattcttagcgcaagcctcctagactgattaaatcaaggctactttcccgattgaggataattactatctacgttcgaaagattgcaagatgagccagtcgattttgcattataaaaactattatacaggccaaaaatggaaccctcagcgctgtttgcccatgagcaaagacgaaagagctttgctcgcgctggaactccgaaaactccgtgtacctcgatgcatctttccattactgcgttgccgactaaatttcattgtgtttccccgctgctgccgtttagacaggctgagactatcgattgcccaggccatggttaataacgactcccaactcggtcgagcctcggaggcgccagccgaccaggtctgtcgggagaaagtctcactaaccgctagctgcaatgctctgcccgtcgcatctcgaagcggacgcgccaaggctgggctgcaagctagtagtctggtgagaagtctcatccgaaagaccggtcggttggacaccttcgaggacgacagactcggggtcgaaatcaaccatagaatcaaagggaaatgctgatagatctccgccgtcgagaacgtcaaaggcgaacccgtcttcagggaaagaaggatttggctcagcgggtgaatcaccgtggaacaggcggcggaagtcatcgtcagaaagaggagctgcaacatcatgtgcagtttgaggttcggagaggtcgaagaggggaagggcgcttccagatccttcgaggccagcgacggacactgcaggtcacacaacaccgctgcaggatgttgtgtcacgtcggaggcctcagccagagtggaaggtgtgaaggtgggggagtagtcggtgacggatggagtggggaaaggaatccgttccatagggagttcgtcgccttcttgtttgaagagggtaggcgtgagggtaggagattcgatggccggggagctggctttgggagtcacgctgcgagatccacggacctcggcggagagcttagccacttgttggctcaagcggttgttctccgactccatctgcgatagacgctggatcaagaactggttctgttgctccatgcggatcttttcggtctccagcttctccatttcgaggcgcttgcgctcgcgagatgtttgagcagcagcacggtttcgaaggacccgttctatccgacgctgctccttctcatcatctgttttggcgcgttttctaaagagtcagttgggttcacatttacgcaggggtggacaacatacctgggagggagattggttttgggggttgggagttcttgtccccaagactttctcttctttgttggcttcttctcatcatcttcttccttaatgtcatcttccggctccggagagtctaatgatgtatccgcgggagaaactgtgtacatctcgggacatggggaggttgggagggtatccattgggttgatagtatccgccatggtgacagagtcaaatggataaccggtgccggacgtgaataataattgcagtacagagtagacagacgtatagtgacttgggtgaaaagaggaagttcagatcacaaaggccacgttattatcacgatcggcaccggagaccagactccgggaatagggttgagtcagagggtgagtcagcaaagagagaggaaagaatggaaaggacagctgttcaactgcaaacggaggggagcgatgaggtttaagtagaggccagcgtggtctgaaagggatgggctgggggcgatggcaacaaagggggggggaaccttggaacctggccaacacacgtatgtaggtacaagcgacaccatacattttcgcatgtgcgcccaagtacctccaaaggggcggagtttctgtgacgagacacgtaaattacgttcatttccccctgcattccatggttcggccccggacgacagccaatcatgatgtgccgtgttgaaacattgcgtttacggaactccgtatggagaacccgacggggcctccgtacacttggtgacttcaatgctgtctatctcacttctatatttgggttgcatacacttgctacggagtaatattgatgtactccgtattatgtacttcggattcatctcctgtcgggtaatacaacacacatccagtccctccgactcgatctatctgaatcatgatacgtctgtcccacaatactccgtacgaatgatcccatatcacacagtctcgaacaatctagggtggacctatggatacgctctcctgaatctgaagacgcgatcaggattgccggagaatgccccatccccacgccaatcacaggtctttcgcagatcaaggctgtccccgccccgttaattctccgtcccccctgattgagaatgtgactctatgattatgtaaatccatggataaggggccaatgccatctagattggcggaaatcagcaggcggatgctacggaacaatctggaacacggcagaacgtctacaaggtatgtcgagggctgaaacgggcatacactgcccctccgttactatttagggttggcctcggaagtcagttataggggtaaccgtggaacctgaccatttgcaaactgaaaagataacgatatattctaaatactccgtacactaaattcagtgatcggtgttgtcatcccattttggaaaccttcgacaccaggggaattatatgcagtccctcaaacaaaaaaacgccatcccatagaaacgtgctcatgacaatatcgtaagcgaacatgtgcccgggtaaagtatctacatggacatatccatcgtgtcgtcgccggcatcgagagcattctgcgcatctgggtcggggaccaccacaccacgtccgcggccagcaagcagttcacgtcgcacttcaggtccaatgtccttgtgtccacggacgagaagcaaatcgagaagcgcttcacgctggtcctcggtgatgtcgttacgataacgctgtgcaaagaccagaagggactggtgccagagaacgggcagccggtatgccttggaaccgacctcattcatggcatcggccgaaggatcgagggcgcggaagcgcatgaagtggaagaccagcgcgtcaatgaccttgtacggcagggcgtacttcttctctaggaagacgcggatgaacatgttgacagcaccggtgctttcaatggaagtcaacgactgttccgcggccagatcacacatgcggagcagggcggcggccgagtgtagcacgggaaccgagacgcgggcaatcacagaagagacaatgtgggcttcacgcagggtgcaagtgccggtggacacgagcgggaacagaagtcccttgaagaagcatgcgggcttgtacagggccttgcgcagcgcattgtaggtgtggatgttcaatttcttggtttcgtggatttcttcgcgcacgcgctccaaaagcacagtgttgataaactcctgggcaactgcaggcttggacgaaatgaaaatacgggttacagcgtagacggcgttaccggtccatgactctgggcgggtgatatccagaagggtctgccagttcggtacagaaggaaggatcttgatgggcttggggagcgggccagacttgtagcgagaaagaatcataccaaccctagaacaagttagcttggcctcacaaggaatgatcacaaaacatacttctcatatacttccacggccttggcaggaatctggactgcatcctcggggacaccaccaccttggatgtattgaccatagggaccctcgccagcctgctttgcctcgtgctcggcaatcttctcgagaatcaaatcggcgagattagtggggccagcggagctgggatccttggggtgaaatatagggtcctcctcgtggggcatgaatctgttgaacatatctagatcattgggatcgacctcctagtaagatgttagaagctatagtactattcaaggtttcggaagtcttacaacttgctcgacatcgtcatcgacccaatcgtcggcctcaaacttcccctcgtcgtcggagaaaggctcttcctcgtcctcgaaccgggtatcgaattcgaatgcactcgactggggccgtgctgagttcttgagttgttcggcagcatcttcatcggccaattcctgtccaatctgtagaatcttgcgcgacatcttcgcatcgacaaagcgctgtccattttcgccatcctcgtcgttttcgtcggctttgcctttgcctttgcctttcttgctgctctgtgtccgaaggtgccccgcggaagtaatatcttcagcaagagggttgtgtctgcgtgccgctgccgcggcacgggagctcgatacctttggcatggctggtaattcttcagataaaccaaaaacttaaaatgagtattttgggctggcttatcgaagtacacacgacgatcaaattgtgtggtcatatttttttttctgccaggcggtgccccccaatctcctctccgcctgtaccccacaccgcctgagcctctacattttctgcaattaatcactgaccgccctagtttcccaaggagattattgtctggtgcgcatgcgcttgactgtttttgtacacaaagagaagcttgctgtctatcaatgaatataggagtcatcagaatactataggacttcaatctgggaagctacagattaccaactcccttgatctttcggatatatacgccgaaacagtttaacagcatacggacaagcttccggttgagtaaggacctcttagctttgcgaagcaaacgccgtggagccatcctcattgattatagctggtcaaattgctgactctccccagaccgacagaccacaacccaagcggacaaacatagcctccgtcatggcatccggccaagccccagggtcttccgctccgtcgtccaacatcaactccccgattctaccccccaatggcggacccctgcttaatgcgcaatttaccgacctgaatccacgatcatctccagccccatccgcccaaggcgatggtcgagccaagcgcaacaagcgagacagccgcaagaaacgtgaagccaaaggattagaccccgagaacgcacctccaccaaaaaggcgagccacagccgcacccagtacagccttgcccagctcaaaactgagcattcttcgtccattgctgctcgccgagccgcacgactcggatcggtaccctccacagcctcgccagttgaatcgcgtgagccgaaagacatcgaacgttttgggtcagagctgggatttctacgaggttgtcgataaacttaccaacaagaatgggtttcgttatagctacgccattgcagaccccggattccctcatatcaaatatcgacagacggatgttcacccgtaccatacccgcttcagtttcgaggattcaccggctgccatatttttttctgagaacgcgactgcggtgaccaccagtgatgcgtggcatactgcccgcgctaatgtatgtgctcgagagggcacgtattactacgaagctcgtgtgattagtggcatagtcaatgatccccaggcacctcagaacggcagaccgacaacttcaccgcgtggccatgtccgtattggattcgcccgacgtgaggccgatcttgacgtgaatgttggggtggattgctacgggtatgggattcgagatgtgaacggcgaagttgtcaatcgcatgcgatgcgagttcttcttccccaagggggaggccatcaatgaaggcgatgttatcggcatgctcattactcttccacctctttctctccacaagaagattgtcgagggcacttacgatcccaccaataataccccatcaccgccgatggcaaccaacatcatccgagatcggattccttttcactacaaatcggatttctgttggcagcaatctaacgtcttctctacaaaacacctccgtgactatgctttcaacctcaaagaaacaccgacgttcggtcccccgtcccctctgaacagcgaagacgccacgctccgcaccctcccagggtccagtatcaccattctaaagaacggagtacaaatgggcactcccttcaaagaactttacgccttcctaccgcccgcaagccgtctcgccaacggcacaaacaatctcggtattggcgagcgcgagaatgccgacgacggcctgatcgggtattatcccgctgttagttgctacggcggcggtgccgtcgaatgccgattcgaggggccgtggtgggttggtccacccaagcagactgaaactggagagcccgtccgtgctatgggcgaacgcttcaatgatcaaatcgccgaggacgtgatggccgatatcgtggacgaggtagaagccatgttcacgtggggcggcattgatggcgatgtcatcaagaacaacaccgagctcgacggcgctggggttgtgggaggggcggaggtgttgaagggtggtgttggtgcggcgcttgactctgcacttgcccatacccccggaactgccggggcatctgattccgctgctaatagcaatcgtgagacgccggctgcaggcgatgttgggagtcatggccttgaagatgcgatgagtgtcgggacagctggcactcctaatgttgaagtgcagggtgatggtgatggcgatgtcgagatgacttagtgacgcactaaatgggaaaatggattaggcgtttggcttttgcaatagcattgataccaattctgatttcaaaatctattcacataatatacatttcatatagtagtcgtacagcgctgggcttaatctaacttccttccctccaacaactctccgactttcatgaccaactgatcgtctccgtattgaccgatgacttggattcctgctagttcggtatcattctgcccagaaacagtcacggggactgaaattgcaggtagaccagccagactggcgggaacggtgaatacgtcgctgacatatgcatccaaaggtgacttcttgatagatttgctcatcaaatccgacagtcgtggaggggatgagggcgcagtcggacatacgatgacatctacgtcaatttcacctgcgattttatttgcatcctgtgcagcgagcggatgcttggctgtaaagaccgcatcaaagtcttgctggactagacgacgcaactgttgtgctttgatgaagtagttatcaatggcatcagcactcaaagtgaatgtgcctaggagaattcgtctcttcacttcttccccgaatccctctcctcgagtctttgagaaaagacatccatcaggctttccgtcaccatctgggccttcggcacgagtcccgtatcgtactccgtcgtatttggccaggtttgaagatgcctcggcaggtcctacgacataatacgtggataatgcgtgttttgtggcgggtagggagacggaatggagggtgtgcccttggcttttcaggtgtgctagagaaagagcccacgcccgtcgaaccgaggaagtcagctcggaaacgttatactctattggcacgccgattcggagaggggctgaagtcaagcgcgaggcaagctgtggtgtttgaagagaggcctggattcgagagcgggagtgtattgagaggctggtagggtcgcactggtcatgttggttgaggatgtctaggcatggtattagcagtcgttttccagtcacactggtcaaacccaccgaagatatctcgcacattggcggttgttttccccaatatacccacggtatctagagaattggcgtatgccaccactccccatcgtgagatcagtccgtatgacggtttaaatcccactatcccggtataagcagctggaagtctgaccgagcctccggtatccgttcctagtgagctgtaaaagtcagcaatcagtctgcttgctgattactagccacttacgcatagcattcgtcgccggcaactgaagcggcacttccaccagagctgccgccggccgataggtcctccccgctggagtcctgacgagggttcctgacaggaccgaaatgtgaattgatcgagtgtgatcccatcccaaactcgtccatatttgtctttccagctacaatggccccggcggcctctaattgatcgacaacggtggcattgaacgggctcacatattcatccaggattcccgaagcgcaggtcgtcggaagatcgcgcgtgcagatattgtctttgatggagatcaagcggccatccactgcggacttgggtttccctggtcatatccgttaattctgaagtagagtgtgggagtctgatgttgctaccttcttccttgcgcacatctgcttcctttacacggtccagccatggcccctcgcgcaacagcggggttatgaaggcatttaaaccacgtgtgtattggttagcgacgcatctttcagcttcgcgcaataaggacatttagacgattgtgggaggagtataacacagaaagggagtgggaacgtgaatttcccgggtccgtgctgcttttctatggtacctgtccgggtctctgtccccctagaagatatgtgtctacgtacatgtaggtatatattataaacttcatagtccggttagaaatagatacatagctattgctcaaatgtaaacatcgatatcacaattttgacctcggagctacaatgtcaacaacaagtttcttcgggccgagcatgaccgaccaagacgtcatccggatttgctcacctctctcctccttcactacctcacctaccagctatgttctcaagaagtatactacagacggccaaccgaagtgctcgccaggcctcagctcgagctgtaccgcaggtgctcggccaagctccattcggtcggcgatacatttcggtctatggctacacacaggcaaaggctctcatctactccaaatatggcgagcccaaagatgtcttgcggttagtccaagtcctcagctgcagttgagccagaaagctgattaatgtcaatctagcctacacaagcactcaatctccgcgccgcacgcaacccaagtgaatctgcgcttgttggccgcgccgatgaacccagccgacgtgaaccagattcagggtgtctaccccagcaagcctcccttccaaacggcgctcggaaatgcagagcccgccgcagttggcggaaacgagggcgcattcgaggtactgtcaaccggcgcgggtgtcaagaacctcagcaaaggcgactgggttattatgaagcgcacaggtcagggtacctggcgtacccacgcgcagatggaagaatcccagttgatcaagatcgaaaacaaggagggcctgaccccgctgcaggttggcactatcagcgtcaaccccgtcactgcgtaccgtatgctccgtgatttctgcgaatgggattggatgcgtgccggcgaggagtgggtgatccagaacggtgccaacagcggcgttggccgcgcagctattcagctgggccgcgagtggggaatcaagacgctcaatgtcattcgcgagcgcaagacacctgaagagaccgaggccctcaagaaggagctcctggaactgggagctaccgttgttatcacggaggaggagatgcttactggcaatttccgggatatggtcaaggagttcactcgccagggtcgggagcccattcgtctggcgttgaactgcgtaggcggaaagaatgctacctcgctggcaaagactttggctcctgattcgcacatggtgacctacggcgccatgtcgaagcaacctgttgcattgccctcgggactgctgatctttaagaacctcacgtttgacggattctgggtcagcaagtggggcgacaagaaccccgagctgaaggagaacaccatcaatgatgtgcttcaattgattcgctctggcaagttcaaggatactcctgtggatgaggtcaagtggagctgggagtctgagggtccagagttggcagagagcgtgcaaggcactttgggcggctaccgtagtggaaagggtgtctttaccttcagcggcggtgattgagtgaacagccacctggactatatgaatgtattataaagctacgtggtattttcccgatatttacttgacagttgattgatataacatgggtccagaaactaggaataattgtaacagaactgctagaaagtatacttatcaacactcccagttcttcttcacccagtcaagaatcaggtttgttagagacacatgtggcatgtacgcatcactttcctttgcaatatcgacatcaagaccagcaaacttagcagccagtatcacatatttctcgataaaatcaaggtagaccaaatccaccgtctttggtgtctcggatgcattgggagatacgagagcacgaatacagtttggcactcggtagaaggagatgggtgaatggatggtatcatcaccgtctgtgcctgcatcatcttgtgtcgtgtacccgggcacgagatccggaccggacagggggatctgctcgctagccgacggccattgttgggcaataacatcttccgggtatgcaagttgctcgggaggggccaacgttgtcggtgaagattcgtccgtagtttcgtatagaacttgaggctgctcgttcaaaacatcgacaataagttgtgccttatcatatgggacatctttcacgtagcggaaggtgctagtgaatggagatacaataaaagtcgagtcttgggtaaagggccctttgaagatatcgaacctcatagcgcccgtattaacaatggctagcctaggtatgtctccacgagactcatccttcaagtcacgcaaaacctcagtttcaagccaggtgtagatgctgttggggtccgggtacttggttcgtgacatccataaatcatgtggggcacatccgtggacttggtccagatgaaggtcggtccgtgctttggcgatcatccgggagacattgagacctttttcggttgggaaggtctctcgatcaagaccggtgtgatgataataagaaaaaagattgttgtctatgtatctgcgcttgaagacaggcccagcagcagactgacggcttgtcttgctggcgaggccatcgattgacatgaaaccaacagtttccatgaatcgaccgctcgctagcccaaaggccttggaatcatactgtgcatagtcacgcacatgctggtgcccgccgaagaattggattggagtatcccaacgaattccccggatctccttgaagatcgcccggtattccggcgaatgaacaggcacatggccgatcaccaaaaacagatccacttctttatcccgaatggcttcttggaaccagtcctccttgatggtagaagatactttctggaccacagtattgttgtaatttccattgaaatcaaagaggaagccaaaggctactatacggatgccttgattcttggtagtgaacttcttaaaccgcggggctagaggcacaagttgttttgtggtcgggtgaatgatatcgatattcgaagcgagatagttgccccggaaatttggaacggttatgagaagctctgcctccgatgtgttcttctggtatagttcgtggtttcccgacgtcaacaggtcgatgtgctggtgccggacaatgtctgaaaggtagatacccttgggcttggacgagtcatataggccgttcccttccactcggtcaccagtatctataacgagtagatcttgtccttgtgcttctgccttttcccgcatgtgtgttgtaaacgatacatagtctccccagtctgcggagtaggacggcctgcgattattagtacaactcggagctcagcagggtccaaggcctactcctgcagatgaccagccagccagccatgagtatcggtagtatgaatgaaattcagttgcccgaaatcaagtggtcgcagcggagcggagatggggtcgggtgcggagggttgagcggcgagcgccgtcggaagtagccagagcaaggacaacatcattaccaacaatacacccttgaaagagtgtctaggagcatggatttaaagcaagaaaaaagatgcaagatgttgaaagatcgtaaaagaagctgaagggagcacgtccaacaagatagcccacagaagatatgtggtgtaaacaagatgcgagctctctccaattcttgtatggttacagttacagtaccggtgagcagctttgatatcacgtgtcgcccaacatcttcggatttgcagctcaaagattatttggacagcgataagtttcccttaggcatttacttcgattcattcgtccgttcctccattcaattgcttttgcggtccgatttggtctgcgatcttgaattgaatccatttgtctttgtttttcatcttctcaattccatcatatctccacaatggcagctccacgacttttccgcccaacagctcgtctgttctcatcgcgccttgcttccactgctctgcgctcgaatatccgccagtctgcctgtgctccttcaatcctgcgccgcggatatgccactgagaccggcaccaaggaggtcaccgttcgcgatgctttgaacgaggccttggcagaggagttggaacgcgaaaagaagtgctacattatcggtgaggaagtcgcacagtacaacggcgcgtgagtaatcctctaagcttcatttgaatcgaaactgacgttgaacttcctgtacagatacaaggtgacgaggggcctgctcgatcgcttcggtcctaagcgggttatcgatactcccatcacagaggccggcttctgtggtatcgccgtcggttctgctcttgctggcctccaccctgttgtgagtatttatgaaaattacggttgatcgaggatcgcatactaatcgttcatgatctagtgcgagttcatgaccttcaacttcgccatgcaggccatcgatcagattatcaactccggtgctagaactcactacatgtccggtggtattcagccttgcaacatcactttccgcggtcccaacggtttcgccgccggtgtcgctgcccagcactcccaggatttctccggctggtacggcagcattcccggtttgaaggttgtctccccttggagctccgaggatgccaagggtctgctgaaggctgctattcgcgaccctaaccccgttgttgttctggagaacgagtaagattccattccatcttgccagatttcgtgtaaactaaccaatgctaggctcttgtacggccagcatttccctatgagcgaggctgcccagaagaacgacttcgtcattcccatcggtaaggccaagattgagcgccccggaaaggaccttaccatcgtctgcatatctcgctgcgtcggtctgtctttggacgccgccgccgagctcaaggagaagtacggcgtcgacgctgaagttatcaacctgcgctccattaagcctctcgatgttgagaccatcattgcctccctcaagaagaccggccgcatcctggccgtcgagtctggctaccctatgtacggtctttcttccgagatcctggctcagtgcatggagtacggcttcgattatctgactgcccctgccgtccgtgtcaccggtgctgaggttcctactccttatgccgctggtcttgaggccatggccttcccccaggtggacactattgttggccaggccgtcaagcttctgcgcttgtaagccaatgaacgagggcgagtgagaagctcgcaataatatagctatgtgcctagtaccctttcatctgttccatcttatgtcgttgttttattctgcctttgttatccaatcgtttagacagtcttttggaaagcatgtaccattacatccagatcaggaccatcgtaaatgtgcttaaatgtggcttagatggaaattcattgctgccagtaatttaaaacaaaggacctacccttaaacgccagtgtgtatttgatatttcattcgaatcgcaagccattcccgtcatcacgacatcgatcagaccttttgggcaacacacccagcaaaacagtccgttggccgccgagggtcataatagccttctgggccatattcctcgtcatcactttcaacatcaccatgttcactcttttgtctttctttatctgcgggagcatcggtttgaggtttcgggctaatattctcgtcgtcgtctcctagaacgttcttcttcttgactggggctgtggaggccgccgttcccttgacagcggagaatgagcttttgaaacctcccttcttgaaaccagtacctcctccacttggtaccacattggccacaggagtctcgatgactttcagaccggcctgcgcatcggctttacgttctgcccgacggttcttctcgagggcatttggatcccgtgttagctgtttgaggtcttgcaaacgctttctgtgcagatgatcgtatgagccaatatgtgcctcgtattccgggtggcgcgagtaagatttgttgcagaggctgcaggtgaaggagctgagcgcagaccgcgctgattcagtctgtaatggttagcttggcgatagcgaatgtggctgaccaggatggttaattaccctcggagcgggatttgtgaaaccacgctatgtttgttagctgaggtatcggatttggaccacaaaggaagagcataccggtgccattgttcttgaactagagtttaggtgaagttgagtgagagagcgtttagtacggccgggcattgcgaccatgtgtgtattaataacgggtctaacgcgtcgctgcctgtgaaaccaggcaatctatatttaatgtctaggctttcatcctcgtgcactcttttgaagagttatctagctaattagactggctctatttattgagaaatccttctacctatacccaatatctaactctttatagtaaatcaagtaagtcgaactatagtgacattgtagtataggagtcacctgacttgtggatactgctcaggacaaatcgtcattacccgccgaggaactggcctatcacagctgccgtattttagcaactcagcgatctttaaaccccaacatttccctgctttttcttagttcgcctatactactttgtacaaatatggatgcatgattgacgacttatttccttacgagttccattttcacacttttcctccagctcccgagcaccaaaaatcccgataaccatacaatgccgtcccacctgctctccaaaccggacgacatcgacaccaggtctatgatctccctgcaagaattagacccatcacctgtccatgatgtcctggatattgaaagcggcgaattcttccctagggccacctctccgacgcaacatacagctggtatttcaatgccaaaactaggcctgagcggccatagctgggattcatggcgtacgtcgagtgacaaaatgctggatcatatattctaactacgatgaccgcttagtgactggtatccaaaaatactcaacctatccacctacggctttcttcatcctacatctcgcgaacacctctcttataccactcgttactcgctccgtgcccgcgagcgaatcctatcttttgctcacacgacccgtataccaagcacccggactagagcatctcgtcttaacacttcctataattgcgcatattgcctccggaattgctctccgcaacattcgtgctgcgcgtagagcacgtctgtacggcgccgagactcgcgcccagcgaagcacgttatatttctggccgcggatgtcattgcaagcacgcactggatactttatcgtgccgctggttgcattccatgcactcgtcaaccgtgttacaccattgatcgtcgaaggaggaagctctggcgtaggacttggatatattgcccatgggtttactcggaatcctatgttctggaatgtcttttatttcttttttgtgaccgccagtgcgtggcactttgttggtggctgggcgacctggatgggctggagagtgaccacagcgcgcaaggagcgtagtcacaaaggctcgttggatggctaccgtggacccacggaaacaaagtcgaagaggcagcgcaagatgtggtgggttgtcaatggaattgccgcggctggcgcggctctttggcttgcaggttctctcggtattgttggacgtgctggcgaaggtgctggttgggaggccaaggggtggaatgagatgtatagtcaggtcccgatcgttgggaagtggctgtgacagctttgcatgattgtacattatgtatctatatagacttaaacctaatatatatgaggagtctgaatacaaccttacatacatgtacttttatagttgatataaattacaaaacaggtattgttgtgtactgcagactggtccgtgcatagaatctttttctccgtcgcattcaacgtcttttgcgacatgctgtgaaaggcttcgcccatgaacgcctcgttgatttttggatcagcaacgagaaggggtaagcgaatactcattcctaccattattctcgcccaatccccccgcccgacccccacttcgatccgatattgtgtccgattcctttccacttctagagccatggaggttcctcagacccagctggtggaataccagggagacaattatcatgttgtcaaggaaggtttggcgaagattctcaatccgcctgcccaagcggccgcttccaagggaacgaagaaggatctcaaagacgacgatcaagcgcagtccgtcttctacaacccaattcaacaatttaatcgcgatctcagtgtgctagccattcgcgctcacggcgaacatataattgacctgaagaaacaaaaagcggcccaaaagctgaagaagcaggcaggcaatggggataagaaacgaaagcgtgaagataaccagaccgagaacccaagacccgcctcaaaagcagaaaacaaggaaaccatagagacaaacgaccaaccagtcccagctgccttagtccccgctcccgcggttgatcaaggacctcagtcagaagctcaaccagagcaacccgcttctttcactgttcttgatgctctgtctgcaactggactgcgcgctcttcgctatgcctcggagcttccatttgtcacaaaggtcgtggctaatgacctatcagagtcagcaatcaaatccatgaagaaaaacattgattacaacaatcttcaaacgattaaacccaatctggccgatgctcgagtttacatgtatgggcttgaccacgcgagcaagttcgacgtcattgatttggatccatatggcacagcagctccattcctggatgctgcagtgcaagcagccaaagatggtggtcttttgtgtgttacctgcactgatgccggtgtctgggcctcgaccggctattcggaaaaagcattctctctgtacggtggtatccccatcaagggcctccactcccacgaaggtggtttgcgattgatcttgaactctattgctatgtccgcagctaagtacggaatggccatcgagccattgttgtctctatctatcgacttttacgctcgtgtctttgttcggatccatcgatcacccgcacaggtcaaattcctctcgggcaacacgatgctcgtatacaattgcgacgtcggctgtggcgcatggtcaacacagcccattgggtctaccaaatctagattggaccgcaaaggaaaccccatataccaccacggcctggctaaagggcccacagctggacctaactgcgagcattgcggcacaaaaacacatcttgcaggacccatgtggggcggtccgctacacaatcccgactttatccaaaagattttggacatgcttcctggagctgatccagaaacatatcagacctgtcctcggattgagggaatgttgaccactgcccttgaagaggacctggacttaacaccatctgattcccaaccatccactccaaaacagcctgcgccaagcacgaagaaccagcatgactctgcataccctgccatcattcctcgaatggacgttgccgctcgggaaaaataccctttctacttctcactcagcgctctctcaaaggttatccactcaaccaccattcctatcgacgagttccgcggtgccctcagtcacctcggatatcgttccactcgtagccacaccaagccgaactcagtccgcacggatgcgccctgggaggtgatttgggagatcatgcgcgagtgggtccgtcagagagcacctatcaaggaagcctccctgaagcctggaacccccggtgctgcaattatgggcaagagccgtgaaaacctgcgtaaattgaacgatgaagaccaatggctatcgcttctcaaaaaagatctgatgtctgccgtcgaggccggcagagatgtcagtgacttggtcactaaggtcgaagcggctctctaccggtccggatcgcgaaactcgtcccagcgtactgctgcttctgcggagactcgtcccaatgccgatccccagcctgtacccgaaaaggaaaagtcacctgcacagcccttcaagcggcctcaccctagtacccttgaggtggtatttgatgaggctctaggtcgtgaggtgtctgctgcgcataccaagaaacgactcgtgcggtatcagctcaatcctcgtgctaattggggtcctctcaaccgggcagggcgttaacgatattcactacatgtagttatacttagaaaagtcctctgtatggtttatactttgtcgaacaaacctatacctatttaacatcgtagagtgacaagcccagcatgtctactccgcgctattattcccattcctggtactttcaatgagtcatggccataatggttggaatgccccattcgcccaatttcgcccaatactttattgttggggccaccaagtgcttagtcacaattcaactagaatgtaacgttaactaggcaacgagaatgtaaggaactatataccaactacatatatgtttctttcattggtatcgtgaaacgcttctggagcagatacatcttctttctatgaaaatggctgtcggcggctgtttctgcggcaaagtccgcgtcgaatacaacggccaacccctgacaacagttagtacaataggattccctttcgtttagtataaccaagctaatctgttgcaggcactgtgccactgtctcgattgtcgcaaacttaccggggccctctacacgtacaatttcgtcgtcaaaaccgcagagttgaacatcactggaagtccaaaagcagtgccaaaaacatcggatagcggaaatgatatcaagaattatttctgtcctgattgtggtttgtatcttactgaatttaggaacgacagtatctgacgaaagtgataggcacgccgctttatggacacaagataaagcccaatggagaggctgaggaggttacgatcgtccgggcagggatctttgatgatacggagattttggatgaagggaggcctgcggtggaaatatacactgagagtcgattgaagtggctgagtcctgtcgagggggctgggcaatttattggcatgttgtctgtaccttcacttgatgatgcttgacggcggaaagcagaaggagatttctattgtagaatgtcgtgtggactgctgttgcatgtcgaaggtgtggtagatttcatcttcgtattataaaatatgaacactattctaggaagtgattcgaaaactactgtattaaaatgcaagttgaaactcatatacatgcacataaaaactccaagccttttgcgacatatcacataatgacccatgaaacaaaaaaaggtctatcaaaaacacaacattataaagaggatatcaacaggaatagatcatttcggaacattttcgctgccctcttcgtacttctcccagttcgccaaaatagaggcaatgcgaggcgagttggtgagcctgtagacgtcctcgaagtattccttggtgatctcgaagggacgggcagtgacgttggggatgtacttgccgatcaacttgctggggtcgatggtggtcttgttgatcttcttcagcaagaaagaacggaagggcttcacaccagagcgcaagaaggtactgtggaatggcacatcgatacccttgagaggaatggtggcgaaaccacgctccaggttgatgggacgcggtttggcctcagtttgcttgacacattcttggatgatgctgaccaggtggtccttgacgtcctccaaagacatgctctccataagagcggggatgtcgatgttctgcgccttcaggaagttcagcaggttggtgaggcagtcaagagcacggaggtcaccagccgcgacgtattgcatgttggcaacgttgtagttgacaatctcgagcaaccagccagtggtctcggagatgttctcaacaacgtactgcagtgcctgctcgttgaaagtcttggagatacggctggggttgacagcgcacatggagtagttggaacgaccctgtgcatcacgctcgaccgcgacttgcatagtcagaccgcggtagaacacgacagacaccaagctctcaatgggcatgacatcagccagggcggccaaagccgagtattcaccaagcgagtgaccagcgaagctgctgtcgcgttgcaccaatcccttggtgcgcatgtcctcgaagctggccttctccatcagagtcaaggctggctgagtgaactgggtggcagagagaagaccggtgggagaccggtaggtgtacgaagcggtattctcatcgacctccttgaagatcttctcggacttgatggatccgtctgcgttcaccgactcgaaggtcatggccatgtagttctcccgaatagccttaccccgtgggccaccgaagtagactgtcagctccttggggttgttcttgacgatgtcaataatggaaagaccgtagttctccatgaagtgacgatcagcccggtcccagacctcctgggcaactgggctagagccatacagctccatacccatgccctgctcctgagagccctggccagtgaagacgtaggaagtgactggctgctcgacctctgcctcaccctccatgaccttctcttctgtctccttgttgctggcctcaaccttgatgatcttgcgaccagcaatcatgccgacatgctgcagcttgacagtgatgatgtcgttgggcagaaccatgccgaccagcgagacttggaaaccacgaacgcggccaatgttgttctcagcggcccaggtctcgaccaggctgcgaacggcggcactgctgtacatgccgtgggtgatggttccaggcaagttggcatagctagagaagacacgcgacacgtggatggggttgtagtcaccagacacgcgggcatatgtctcgttggaggcgggggcacgcagttctagagcggtcttgccactgagcgggatggggttttcaaagtagactggctgttcaatggaagttccgttacgctggaggtagtcaatcacggggttaccgtgtgagtcacctgcctcgtattcgacagacgcaacttggatgatctccttggtgggaagctcgagaagaacctgcccaacggtttggacgttgctgaagacagtggtgttcttgaaacggatcaagctctgcaagcggaacgtcagggtctggcccagaagctcaacgtcagagtcgtccatgcggaaccattccttggagcggaggatggcgacatcccggctggttgcgaggtgaacctgaatgggaacctcatccttgcgctggaaggtgttctcatagtccacgtaagaaccccggtacaggaactgactggtgacatgcataatgggtttgttgtcgcgtctgatggtgccgcaaacctcgaccatcttaccagaatcctggttgatgatggagttaatctgagccgtggtgtccagaacatcaccaacctttaggggctgggcgccgggcaccatcttgaacccgttggacaagtgaacaagcttcagcaaatctccatcaatggtgcgggggaagataggcttggtgattgcctgccagcctgccacaatagcaaagtccataggggcaaagacctccttgccaggacggtcaacgaaagcctcactggtgttgccaactgcgtgaacaaagtcggcaacatcttgggcagtgatggttttctggccaccactaaaggtggcagtagtaggggtgtcgaagggaacgtccttgttgccgaaccagatccggtagtagaactccttgatgcgatcgttgcggtcacccataacctcacgaataggggcgtatccagtctcggggtgataagtgaacaagaagttcagagggacaacgccattctcggcggtgcggccctcgatcagggtcagcatgatttgccccttctcgttgatcttggcctcgaccgtcttgaccaacttgccagactggtacggctcccgcacactaatgacagtcttcgcaggatcattggggttggagatctccacatacatgcctgccgtgggagcgacaatccgcttcatggggttagactggaagcggtggccctgaacgaagacatcggccaagaacaaagcatgtctccaagagtagacattgccggcaagaagaccgagccagcggtccaagtctggcaaggctgcagtggaagacaagcggaaactggtcttgcttggctcttccgaaataaccaaatcgtcagactccaattcggtggtgtttgtgagctgcccaccgaagtactcaatgacaggaatcttggtgctgtcgccgccgtagacatcgcgcaagaggccagcgatgtggccctggtgaacaccatcaaggatatccttgacgggctcatcaatgatgttggagaagcgagcagccacaggaccctgaagaatacaggttcggccgacatcttggtcgacaacagcctcaagatcctcactctgccacagagaatccttcttgaagaagaactcaaagttctcatccagcacggggacgaaaggcacgggcttctggccgcgcttctggcagagcagcaggaagtgctgcacatcttgtgcgttgatcagctgattggcagcttcgggataagcagacaaaatattgtcgacggtagggtagggggtatcaagatcggaataactttgaagcagcgacgcctggccttcggcagtagtgaaacgctcctcgacacggcggatgaagtcacccgtcaagcgcttgagcgaggcatcgatccatcgcgactcgtgcttgatgtacatgaggtccaccatgcggtgaacgacctcagcataagtcatatcttccagatccacagtctcgcctgcggcgttgcgaccgaaccagaccttgtggaagtcatcattcagcttcttgatgatgtagttccgttgcttcttcagctcaggcacacgcttggccttgtcaagcttgaagatcttctggtccatctcctgccagaacagcacaccgcgagtggccagcttgtggataggctcacccatttcagacagaacggtgatcacaccacctgttgatttctggtaggtcttttcccactccgcatcgtccacaccaggagcatcagcaattgccttcttggcattgtgagaggtgtgtgcctctttggcgatcatcatgcgagatccgaagagacagccgtcgaagggcataggagggtagccgaacttggcggaccacgtaccggagaggtaaggataagtgtcttgcgaaccaccgaagccactgccggcaacaagcacaatgttgtcttgcttgcgaatccggctgtacatctgaagcataggctggtggaagtcctcgaaggagtggtgaccaccgccacggccaccagtccactgaaggatgatggggaacttagggttggctttggcaacattgatgacttgctgaatcgcatcgacggagccaggcttgaaggcaatgtgcttgataccaagggtttcaatatattcattggcaacttcaatagatggcacaccagcgccaatggtcagaccttcaatgggcacgccctccgcgcgcaaccggccgatcaacggaatctgccaggccatcgcacgcgggttgacgtagatcaagttaatagtgataccacgtccaggggggatagccttctcaatcttggtaatggcctccgtcatcgtcttcgcgttgtagtagccaccaccagccagctcgatgtgataaccggcgttcatagtagcagccacaaagtcccaggcaacggtggtgggtgtcataccagccaccatgacaggggggattcccaacagtcggctcatcttggtgtccacgtaggtttgaccagtagatgtctttgtcaagcgagggccgtgttccttgacccagtccacagcatacttgacggaatgctcatcacggtcaaacagttcgggcttgtagccgacttccgcattggttccgtccatttcaccggcgaggatgacccgaacaccggtaccgtccttgtttctgttggtcaaaacgcccagaccagagatgccaccggggccgaaatcaaggatgtgggttgcatgggggaagacagtggctttctcccagttgaccgcatcgtgggtgatcatgcgaaccaatgcgggcacaatgtccttgtcgccgagttgccgcagatcctctccagtcttggtgtggaagacggggatctccagtgacttggcggagatctcaacaacatcttccagatcctcgagaatgcggtcgtacgcagaaacaaggtactggctgtggaaaggagcagtgatagggaggaaacggttgacaaagcgaaccttgcgctgtgtgaatggcacgcgattctggtcaagtccggtgggagccttgaccttacgcaggcgaacattgagaccgtagagcgaaataggaggaccagtcaccacaaagttgcgcgcactgttcactagggaaatggaaatgtggcggtcctcgggcaaatgttggttggtggcatcgatgtgctcctgaacggcggcgagcgagaggtcgcggatagacagcatgggagtaggcgttccctcgccattctcaaccgagtcctgaagaacggacggggcgatagaggtgcgggggtaggcctgctgactgcgcagaccaatccagaatagcatggtcagggcattgcgggcggctgtggcgaaggactcccagctggttgcagttgcaatggcggcggctgtgacgactccctgggagtgacctgtcgtaccgaggaagcggcccaggatatcaccaggctggcggcccaggactttgcaggtaaccatatagtgggacaactggaccaaaccaatcaatggcaaactcacgggcgcggacacgagataatcgatatcaggctgtgcatcccggtcttgcagccattgcaagatatccatgcccttgggatagagcttgctagcctcgggctcgtgcgagagcgtctggagcaattcggcggaggacgtaatcaattcttcgacgaaagaagggtacgtggtgtaaatgttgcgcaattcatcaaagtactcctcgatattgccttgaccaccgaacacagagtagatacccgcggcctcgtcggatgccgcacggaacaaggccgaatcgtagggcttggtgggccggcccgccgcagctcgcccggcgtagtaggcctccacgacttggttcttcttagcaacaatgccggggagcgcagctgccactgcgtgaacatcattgccgcgcatgaaggcacgttcaaattcattcaacgcgagtttcagaacttccaagtagttgccctgtgcatcgtcttcgtcctcgatctcgtgagccacatggccaatgtagcgggctactaactccgtcactgatgatggctcatcgtcttgggccaattcgtctgtgggctcgggtaacgaagcagtaaagctgtctttcaactgcgaggcgtggaaatgaagcgaggtaggaacgaggaaagagaactcgagggacccatgggagagggtgagtgggcggagggattgcgaggatcgaggagtgttgataccggtttggggaccggtcaatgtgccgtacatgatgtggctctctctctctgaaagggaatagaaggagattaagcggaaaataccagagggaccctaaaagcgaagaggggtttcctgtgttctgttagattccgaggacacaacacacacacgatctcggctgcactcactggaagacctgagttctaaaggtctgaagtgaaagggggggtattatcaagggaataaagagaagtagagggacacaatttcaacagatatacacataaaataagaaaagaggtccagagcacgattgagcctgaaggggaaagaaaaaaaaggtctggttgaactgcagacaattcaaaagggtttagcgtgggagaagacccgccccaatgggttctgacttgggttgaacccgttgggacgcagtacactgtgataccggtattgtcatggagcatggcaatgatgttttttaattgattttgaattgatttttgaattgttttgtggtttttttcacttcttttgatatttgcatatgacatatttaaagcagcatcgaaatattactctagttcccacctatctcgtagactccattcgtaatggccgttgggattcttcttgaacaacgtatgttgtacaagctagtctgtcccctgacccaagctagctctaaatgatccacgcaaatcgttgcttagtgtcagatccttcggccgaagctttgaaaccccaacgccctcaccaatttggaccaaattgaccgtgtccctccccattcttccgaatcgcgtcgtcaaatgacttggcaatttggtgggatcatcagcattattactcttctcattgcctgatatcattttcccagttctctcgctgtctccaaggtgggtggttcctcgttttcccgttattttcattgataaaactgcgaaaattaccgtccggtattcgttgataccgcatctatcgccgcgctccatttcctttcccaccttttttttcccttcttctttctggatcaatccaattgtcttggggactttcactgatcacttcatacataggattgactcctattctaattctctcctattactctcttctagtcgtcctacccactccttcctctctccgcttgggcattctacgacaactcttgtcgcgcccaaccccggacacttttgtcctaatttcgtccttctgtttaatcaattgatacccatcacatctatcatgcgtccggaagttgaacaagagctcgctcacaccttgttggtggagctgctcgcctaccaattcgcctcccccgtccgatggattgagacccaagatgtcatcctcgccgaacagcgcaccgagcgcattgtcgagattggtcccgcagatacccttggaggaatggcccgccggacactagcctccaagtacgaggcctacgatgcggccacttcagtccagcgccagattctctgctataataaggatgccaacgagatctactatgatgtcgagcccgtggaggaagaaccagaggctgctgcagagcccgcttcctcggccccagcagctgccgctcccgctgctggagctcctccgccaccccccagtgcaggccctgcggcctcagtggaagatgccccggtcacagcagtcgatattgtgcggacgctggttgctcagaagctaaagaaaagccttgcggatgtgccattgtcaaaagccattaaggatcttgttggaggtaagtgcagcctagtccccttcaaaaaaaaaaaaagttggtctggtctaacaccgtaaacaggcaagtccacattacaaaatgaaatcctaggtgacctgggtaaggaattcggttccacacccgaaaagccagaggacgttcccctcgatgagttgggtgcctcgatgcaagccacattcaacggacaacttggaaaacagtcttcctcgctcatcgccagaatggtctcctccaaaatgcccggtggcttcaacatcactgctgttagaaaatacctggagactcgatggggtctgggatccggccgccaggatggtgtgctcctgctcgccctcactatggagcctcctgctcgtcttgcatcggagacggatgctaaggcctatatcgacggtgtaaccaacaagtatgctaccaacgccggagttaacctttcggctccggttgctggtggtgacggtggaggtggcggtggtggcatggtcatggaccctgcagccctcgatgcccttaccaaggatcagcgagctctgttcaaacagcagcttgagatcattgcccgctacctgaagatggaccttcgtggtggtgaaaaggcctatgtgacatctcaagagaaccagcaagtgctgcaggctcagttggacttgtggcaagtagagcacggcgacttctacgccacgggcattgagccatcgttcaacccgctgaaggcccgtgtctacgactcttcctggaactgggctcgccaagatgccttgagcatgtattacgatatcatctttggtcgcctgcaggtggtagaccgcgaaattgtcagccagtgtatccgtatcatgaaccgctccaaccccctcctcctcgatttcatgcagtaccacattgacaactgcccaactgagcgcggagagacataccagctggccaaggaacttggacagcagctcattgagaactgtcgcgaagtgttggaggtggctccagtttacaaggacgtcgctgtgcctactggcccccaaacaaccatcgatgcccgtggcaacattggctacaaggaagctcctcgcaccagcgctcgcaagcttgagcattacgtcaagcacatggctgagggaggtccgatctccgagtacagcaaccgcaccaaggtccagaatgacctgaagagtgtttacaagctgattcgcaagcaacaccgtctctccaagtcgtcccagatccagtttgatgcactgtacaaggacgtcgttcacgctctcggcatgaacgagagccaaatcattccccaggagaacggccactccaagaagggcggccgcagtgctgccaaacgcgttactgccacccgccctggcaaaatggagactattccattcctgcacctgaagaagaagaccgaccacggttgggactacaacaagaggctgactggtgtctatctgaatgttttggagtcggctgccaagaacggtctcagcttccagggcaagaacgttctaatgaccggtgctggtgccggttccattggtgccgaggtcctccaaggtttgatcagcggtggtgctcaggtcgttgttaccaccagtcgcttctcgcgcgaggtaaccgagtactaccaggccatgtacacccgttacggtgcccgtggttcccagcttgtggtcgtgccgttcaaccaaggtagcaagcaagatgttgaggccctggttgactatatctatgacaccaagaagggtcttggctgggacttggactttatcgttcccttcgctgccatccccgagaatggccgtgagatcgactctatcgattccaagtctgagcttgctcaccgtatcatgttgaccaacctgctccgtcttttgggctcagtcaagacccataagcaagctcatggctacgaaacccgccctgctcaagttgtcttgcccctgtcgccaaaccacggcacctttggtaatgatggcctgtactccgagtccaaacttgctttggagactctcttcaaccgttggtactcggagaactggggccactacctcaccatctgcggtgcggttattggctggacacgtggtactggtctgatgagcggcaacaacatggtcgccgaaggtgtcgagaagcttggcgttcgtacattctcccagcaggagatggctttcaaccttcttggactgatgtctccggccatcgtcaacatttgccagctcgacccagtctttgctgatcttaacggtggtctgcaattcattcccgacctgcagagcctgatgaccaagctccgtaccgacatcatggagaccagcgatgtccgccaggccgtcatcaaggagaccgccatcgagcacaaggtcgttaacggcgaagacggtggagttctttacaagaaggttgttgcagagccccgtgccaacatcaagtttgaattccctaagctgcccgactgggagaaggaagtcaagccgctcaatgagtctctcaagggcatggtcaacctggacaaggtggtcgttgtcactggtttcgctgaagtcggtccatatggtaactcccgcacccgatgggagatggaatccaagggcaagttctcattggagggctgtgttgagatggcgtggatcatgggtctgatcaaacaccacaatggtcccctcaagggccaggcctactctgggtgggttgattccaagaccggtgagcccgttgatgataaggatatcaagcccaagtacgagaagcacatcttggagcacactggtatccgtctcatcgagcctgagttgttcaagggatacgatcccaagaagaagcagcttcttcaggaaattgtcatccaggaggacctcgagcctttcgaggcttccaaggagacagctgaagagttcaagcgtgagcacggagacaaggttgagatcttcgagatccccgagtctggagagtacaccgtccgtcttcgcaagggcgccaccatgctcattcccaaggctctacagttcgaccgtcttgtcgccggtcaggtgcccactggttgggacgctagccgctacggtatccctgaggatattatcgagcaggtggatcccgtgaccctctttgttcttgtttgcactgctgagtctatgctttctgccggtatcaccgacccttacgagttctacaagtatgttcacctgtctgaggttggtaactgtattggctctggtattggtggtacccacgctttgcgcggtatgtacaaggatcgcttcatggataagccgttgcaaaaggatatcttgcaggagtctttcattaacactatgtccgcctgggtcaacatgctgctgttgtcctctactggtcctatcaagactcctgtcggtgcttgcgccacggctgttgagtctgtggatattggttatgagaccattgtcgagggcaaggcccgcgtttgcttcgttggtggattcgatgacttccaggaggagggctcttatgagttcgccaacatgaaggccactagcaacgctgaagaggaatttgcccacggtcgcaccccgcaagagatgtctcgccctgctactaccactcgcgctggcttcatggagtcccagggttgcggtatgcaacttatcatgactgcacagcttgctctcgacatgggtgtgcccatccacggtatcattgctctcaccacgaccgccactgacaagatcggacggtccgttcctgctcctggccagggtgtcctgaccaccgctcgtgagaaccccggcaagttcccgtcccctctattggacatcaagtaccgtcgccgtcaattggatctccgcaagaagcagatcaacgaatggcaagaagccgagcttctctacctccaggaggaggctgatgccatgaaggctcagagcgacgagaccttcaacgaggccgagtacatgcaggaacgtgctcagcacattgagcgcgaagccattcgccagaagaaggatgcccaatacagtctgggtaacaacttctggaagcaggatccccgcattgctcccctccgtggcgccatggctacttggggtctcacagtcgacgacattgacatcgcatccttccacggtacttcgactgttgccaacgacaagaacgagtccgatgtcctctgccaacagatgaagcaccttggacgtaccaagggcaatgcagttatgggtatcttccagaagtacctcactggtcaccccaagggtgccgccggtgcctggatgttcaatggctgcttgcaggtcttggaaagtggtcttgttccgggcaaccgtaacgccgacaacgttgacaaggtcatggaaaagttcgactacattgtctaccccagccgcagcatccagaccgatggtgtcaaggcgttctccgtcacctccttcggtttcggtcagaagggtgctcaggtcattggtatccaccccaagtatctgtttgccactcttgaccaggctcagtacgagacgtacaagaccaaggtcgaggctcgtcagaagaaggcctaccgctacttccacaatggcctgatcaacaacagcatcttcgttgccaagaccaaggctccttacgaggatgatctgcagagcaaggttttcctgaaccccgactaccgcgtgtctgttgacaagaagacctctgagctcaagtattccgccactggtcccgaagccaagaagtctgaaagcactcgccagaccctcgagtctcttgccaaggcaaatgccgccgagaactccaagatcggtgttgatgtcgagcacatcgattccgtcaacattgagaacgagaccttcgttgagcgcaacttcactcagagtgagcaggactactgccgcaaggctccctccccgcagtcctcgtttgcaggccgatggagcgccaaggaagccgtcttcaagtcattgggtgtcagcagcaagggtgctggtgccgctttgaaggatatcgagatcggagttgatgccaacggcgctccagtggtgaacgtaagtgcatgattatcccatgatcccagtgacaaagctaacatatctccagcttcatggtgccgccgccgccgccgccaagcaggccggtgtcaagaatgtcagcgtgagcatcagtcacagtgactcgcaagctgtcgctgttgcggtctcacagttctagagcaccgtgcattttcttttcatgttcgcatatagatcccagagaccaatggttctcttgggttgagacgtaatgattgtgatttatgttttttagattccgaaccagcttcgtctcctggttcgttgtgtttataatgggagtgatgacattttctatgtcttttttctgttgaattttcatttagagcttatagtctcttgattagcgatattatcttttaaaaataacaaagatttctatccgtatacaaattgaagatgtagtcatgactccatagtccgtatctccgcagaccctttctctgtgtacttatatcgcagttcatagcaaccagcttgggagtctggtcctattggcttttattgcgagcagaaaattggccgtacccaacttgaagtattatttaaaaatggaaagagtcatgcaaaataggcgtctttgtacacgtaaaaaccaaatgcatcaagtcagttgcatgttatatatacagctttgtacttttccagtgggcatatcatatcccacgagacaatgtattcttgggtttggtcagtactggggattgtagtaggccatgacgtgcagcttgacaactattggaaggcaccactcgatctcaaacgggcaggaagggactggcaagggactgccccaaggcaagagcgttcctggacttctgcccaaggagggaacgataaaagaagtgagtataaatggaaaggtcaaggcatatattataacccccaaccctcctgcttttcctaggctagctggtgttgaagaacctctggatccttaatttttttcctccttggggatcatttgaagctattcacacttctaacccaccataacccccacccccacccccacaattcgggcaatgggtgtttgtaacacagcccgaaagggaaactgcgatccttttagctaaggttattagttatgcaaccttaaacatgcggaaccacgggtcctcccatcctctaccaatgaaaatcctggcctcaggtctctattcccatttgacattgttcattaactagggattgtatcccattgcttaatttctgtcactgtgtcgaggtatcacaagtggatagggcccgaggctagtaataattttcattggtacatatgtagaggatatcaggtaggcgttcattatggacaactatgaaacaaccaggatagaccgctaacagaagatattcatagttaaagcaatcctagtcacaagatgtttgctggacagtgattggtagatagaaaatagaagtaaaaacatggaaagtattcaacatttaattttgactcggaagtacctttcgcaagcttcagttgcccttccaggggcctggtcgcagcatccgatcctcttttccataaacactgacgtccttgacaatggcaatgaatctccggtggttctccttggattcgccaatacgagggcggaaaaccttcaagaggtcgctgctgaggatgccagatgctgggatggctgcgtggatttcgccagctgtcgggaacgtctggttgccagaaactggagtcgacatacgaaggcctgctgatgttagtttatctcttgcatcaaatatcgattgggaccgaaactcacctctagggccgtcggggctgttggcacggcttccggagagtcgaggcaaaggacttgcgccgcgagacccttgtggagtgccgccacgagaaaccgaagtaggtgggttgagtttcagtttcttgatcttaccaccctcggtcatttcagctccagatccggcagcagtgtcgccatcactgccagatccagcaccaccagcaatgtttcgtacgcgtttcttgccctagagaaatcagtatatatggccaaaggggaattattgtacctacctgcaaagcggatggagagatcggacgcgatgggggttgagacgcagggagatgcatgtttttggccttctttcgagatgtatcggtgccgctcgcgtcggaagcgtttggtgatccaagccttttccgtgatccagcagctgaagctttcttcagggcgtctgtatgcttgggtcgaccggaaggagtatttcctcccttggagagcgcttctttttggttcttttcttcttctgccttcttccgttcttcctccttggcccgttcggtttcgctgtcgtcggagctctatacacattagctttgggtctgctgtagcaaatgagtgaaagcttacctcctcatctgtgtacggattgacgtcagaaccgctgctgtaatcaaagttccgttctctcctcttcagagccttgcgcacacccttgcccaacacacgccgggcctctcgttcacgtttctctcgcatttcttcagcgtcatattccttctcgtccttgagattgaacacattcgccttgagctggtcctctttgatcctcttttccgcatccttggcatcttcatcctcattgaagaggtcatcatgttcttcgtcgtcggcaaatcgatcctcttcgaaatccatttcaccagcttccaatcccgcaccctttccggcggttgtgccctgttttccggcgtagactttgcgctgcttggcgtatgtttccagttccttttcttgctccagctgctgctgcttctccatgaaccatcgggggtctttcactctcttagccatgaatttctctgcttcgtcaatcgtcaaagccttgaaattactcttagcgttaaacttgtaccacttttcggccggtatcattctcatctttccgttgtcgaggacaaagatcgcatgtgtttcggacagggctgcttcgtagtttccaacccaagtgtgctggttatcgaaatcctccagatgccatggcaaggcttcttcgtacttgatccgtgctcgtgcaatttcttcgggggtcatatccgacttgaaaacctgctgcgtcttctgctttggggcatttggtcgtttcgaggttgagccgagggcgggggcgatttgggaaaggttctcagcgcgctctttttcacgtgctgccttgcgagcatcgaaggcttcgcgttccgcttcatccattggctggccatcgatctcggatctccccgaatttggatcatgagttcgtgaacgtgggtcgcggcggtgaagtcggactggtcgcgtaaattgtgattcatcacgtgggtcaacgcttttcttcgaggcaaatcgcgcgatgtggtgcttcagtccctccatcagagctcgctttgtcgtcaccaccgggtaatcaacatatttatcactgagcaaaggaccgctgaatccattcgctgccatgtggttgtttgaaagctcaagcataggtcgctcggacgggaagattgcctggttgtggggcctttgcggtcgtgaaggaagagtcttggtggctactccattgccggcaggagtggcgccagctggtctgggaacaggccttctcttcggtcgaaccaaaggatccgctgcttttggacgacgcatcctcatcagcggtgcaccatttgggccggttggagtgcgagcattcgatggattcgtcggagtcgacatgttgccgacgtacaggacggagtcgtacgagtggtagaaggtgacgcgaaggatcgcactagggtggaaggacagaacaaaggtagccttttacctgttttgtgttgcgacaaggggcggccgacttaaaaaagagtgagagacgctaaagccactttgagagcaccgaccaggaggtatgacggtagacctcggagcaaatgtttacccgtcccgccagattggccacgtgactcggggagatctccgggtcgtgtggtccgtgcattgggaggctcttttaccttaaagatcacctctataactacagcctaactgcgattgagaatagaatccaacggaagcaaagagactaagggtcaaaacaccgtagtcggtctgaactgaagcatctctaagatcctcttgagccagctgtatattcagattatccaagtccttaacttcaaagtcattgagaacagaggcgcatatgcagccgaccattcttgcttttttggtgattgtgattgagtactagatgtagtgtatctgagatttggtataattcactggatttctattgtgaatttctatttccttgttttttaattcatgcaaaatctactgaccgaatcgttgacccggttccagtggtttgtatggacaagcaatccaatcacagcccttgacacaattagtagggaccaaaaacaaccagaagaccaaggacgtacctgtttataaatctccgtcccccaccatttgaaaccatcgacccatcccgggtaaatgaaggcgaagaagacaacgaccactgagaatgccaacccggaatccaatgcggccgacaatgtcattgcatatttttcccaccatgcggtcctccttcgccggatcacataattgaacacaaaacatacaagggcccagatggaaaagttgagcccggttgcaggtgggatccagctcagactgccaaacaagatagggaagttgaccatacgccagaaactcttcttgctgtgtcttcccagaagccacgctccgagaggggcgatggctcctatcaaaaaggcccagacaagcggacggtatagccctcctgggccaaagaagcgctgcgggccaacgactccccagagaatgctgccgttgaaatggactcgagcaatggggcagttgaaaccattgatagcctctggggtgcaaagccccgggacaaaagtgaacatccagttcagcacaccaatttgggtcagactcgagactaaagtcgccatcatctgcacgccaaacagaattcgtggtgggatcttcatgtaatggccgagcttgaggtccgaggaaaatttgatcccttgtgcagagctgatatatgagtaggtcacgaaaatcatgttcgctacaggccttcccgggaatacaataccgcaaaggagttggcagatcagatagaggctgctatgttgattggtgacagccatgatgatacccactgggatgaaaaacacagaagtaataccaagagccaggagtaggccataccaaggtaaatgtgttgggtaacttttgtgcaggttagttgctatcgaaggtcaagggggattgaaaacgtactattccaccgtgaagatggcaatgacaagcatagaaacgaacacaacaagataccacatgaggggagcgtccttatagcgcctcatcaagcgacaatgaacatcttcccctcccaatggaatgtcctggctcgcttcacgtgagctagtccttgggatttcataactctgtcggggagcatcattgcttccacgaaggggctggtacgtctccatgtctggcacttgccgtttttcctcaaaggccttcctagtctgttgccaaatgtccttgccataccagcaaatggtgtgagagacaagggatgtcaaagcagcaaactgaacaccgtaagacagcacgtaggtgattgggagataaactggggagtaatcttgataggccttttcatcaaacaaaaaatccgtggtcaatattcggctcacgttgtatggtcgcccggaattgtcgaacacagctgttgaaactatgggcatatatgcagagaaaagcacatttttataatcttcatttgatcagcagagtcaaattagataagacgggggggccttacaaagtattggggcggctatccagatgacaaccaccagtcccgtgacaatattagctgcagcccaccagggcgtgagtaacggtgagccaatataggcaatctgagcccaatcgaaggtcaagggaaacattccgagaccagaggcaacaccaaactaaagagagttagctatagcagcttaaaaagaggacctgaatgtcttaccaaattcgaaatcaccacatttttgggtgccaaccaagtgatcacattaaaataactcagagcaggcatcaacagtcccgggacaaaataccagagaaaggcccctgcccacacaacgacgaagaacttatatcgggagatactccacccatttgcctttttgttgacagacttgtgcattgtagagaacattgcagtggacatcagggtccccggccagatcatagccgatggccgcacgaggaatcgtcgagttagacccgcgaatgcatatcccaaaacttgagtggaaattatgagcagcagctgatatataattggaacatcctggttgtaaaatttatgttgctcaacaataacctgtcttgggtcagcttcgtcatgagtatttcgttggtctactaacatcagtcgcgaaagcaaacccaaaggaaacattgctgctgatgtaaacgcaagcatgctccttttcgttccaacggccctgggcaaaccaaagtctgactcgagacgccaatggaacaggaggggcctcgatatcaccggagagtgattcccggtggtgaagggttccgttttcaaaaaactcgagcggatcacctgtttgtctgaaaattaaatcccaaaatttgcccagtggatggactagaacaagagcaatgattggtgtaatggcaacactgggatagcgcaaggaaaagaaaagattggcggcagaccccgtcaaagagaataacaacgaaagaatccacattcgaggtgctagagatcattagatataaggagaaaaagcaccagaaagaaagcctactgttaatagaaagagagaaatcatctgtcgccggaacggaagcccgaacttgggcatacggcgaattgtctggaggatcctcatccgaggattttgaatcatcatcatcaatgtcgaggacattttcatcatcacttgtcatatatggtgaagacgccggagtctcctgcatcaccgggttacccggtacagccaatccagtagcgaacgagtatttcgaatcaggacccattcccacatcggacgcggcggaggaaggccgacgatttctctctgcatataagctgtttcgttgtctgacaaaggaatgtgatcgtctcggagtagaccctggtacgttggaagaacttccgatgccatctccgaagctcgcgcggtgtaaccccccacgaactttcggcccacgcgaaacgggtgtgtcctcttctgagccgtccgggtctcgcaatgctccgtaagagggagcgcccaggacgggcgatgaacgaagaagaggggcgcccgacatgaaggcccgaaagcgctgaacaatccctgtgtcggggttcacgccgggtagtggattgtcgatttcggggtagtttccattgtcgctcgcgctatcatcaaaattagaattagtttgatccggtccagcgggaagccactcgcgcctcgaggtcgaggggcaagacagcttccgcgtccgcagtggaatattggccgacgtggtggtggggttatgatgaaatactataagtatttcaggttaggccgtgcattagctcaaaatagatcagggcattgaggaatcagaagagaagaccacagagctagtggaggactagagcgtagtgtggtgaaaaacgacccgttgtccgagctcatgggcttgccccaccgacatcggcagatttatcttccctttcgaacgcaggtaaggttacattcaaggcactaacaacaatagaaagtgttttatagtgttcgcttccatatgtacatttcagtttggtatctaatcattaaaacagttctacaactttttcatcctcgttttgaggcgcctcgatttgaggttgttcgggctccttttcgccttcaccctcaccttcctttgcctcgtctcgcatcaggacttgcactaaccggtcgcatgcctctgtcacattttcatcttcaacgtgcatatgagtttcgcgaatcaatgggtaaaccttgactgctcgcatcttctcccggccgtcccgagttgtggttaggagaagcagggtttcgagatgggttgtgataatggtagggtcgctgtctcgttgcttatcgggcggcaacagttggaggtctggcagcatgtccgccgtatcatcttccgccagctcctctggacctgcaagcgggagcaataagtaaggcaaaaggttggcaccgtcctcgtcaaagagcattggatgcgagtcgatctcaaaagccacattcttgattgtggatgcaacacccttcctccggatatcgcttcggtgctccgtgaagaccgtcagcttggtgatggggaccaccccatcgtactcctggcgttgagtgaaataggccctgccctgttcggtctgggagaggtcggcaaacacgtacgacaggtaatcataattggcgttcttgttgagaccaccctcggcacccttgacgaagcagtccatcacctgatcgatcgcgttctcggaggtagatacggattcggggactttgcgcttgagagcgaatagtttgtttaggttttcggatttgacgaggttggctaaaagcatagccacttcatcggcgttaggctctttgggattctgggatcagacatattagccctgttaccgtctagttatgacagtcgagaaaactcactgtcaatttcgtgagcaattcctcaataaacttgtcatccccggcgaggagtttcaacacttcttcatcgccagacaaattgaccaggatagtcaatgcattcttcgcaatgggctgtaaaaagatatcagtcgaaagtcacccccatgatcgcagataacgcacgtcgtaatcgcggactagaagcatcaaatcgcgaacgggtaggagttgattgcgcttgaacacttcaggctgggtggtggagaagccgacgagggtttcgcaagctatgagctgttagatcatatgttcgtgctgtgtgagaagagttgccatacatatttgtctgattggggtattgccatggtgcaggaattccaccagctataaagagtcgtgagtgagctaatcaatatcgtaggccgtaggcacgcacatcttcgagttcagtcggcatattggagtgtaatgtatgagccagaaagaaggggctgagtatgtggtatcgtcaattccaaaactgtagtctcaaaagattttttttcccgcgcaagtgggggtttctcgacgtcactggaaacgcggagatgcctttcagggctgctatttgtaatacaacacatattcatacatagttatagacaatctgaagagtgtaaaagtgattattcaataataggcaatacacctaatcagtctatatttccaaatatacatgtcgacgttactatattcattcacagaagaggtcggaattgccccgcgatctttagttaaactagccatacctgactaagcacatggtaaaaagcggcgaggccttagcacttaaaacggaaaggcagagcctcaggaggaagtcaccatctccaacatgttgagagttcaattatcagtgaaggttgcgtatgaatttatgctgctcttccgcctaagacttctaactgttgtaaaaatgtcacagtttcctgctttcccttgctagccactaaaatctaggaaactgcatctcttttccttctcgaatttccaggattctttcgaatatccatactattgtaccacagtacgttcctacaaaagccaaccgcccgattcgactgcccttggatggtagaaggcagatacatagagaagagactacaccagccaagcttgccatgccaatatcggaccgtgttggagtttgataattggccaagaggctacccggtcatgaagttagcttttggatgttattatagtggaaagggaaagccaacatacaaacatattgctgagaataatgctgcgaatctgactccgaaagatgttgatattgtccgatgacctgcagagctgtctggctgtgtatcaacaatcgaagccaagccatggcaagcacaggcgtaaaaaaagacaaaggcgccgttggtgtgatcagtctggtgttgcagagctttgtcgctcccagaacaatacccgcttgcccagaaaagccagagaattgctccattagatattgagtccaggattggtatctccttaagccgtatcggtggtgaggagtatgttcaggtgagaaaaagaaatgataaagtgcaaagtaacaatcgaggactttgaactgatgcaggtatggagcacaagacaatgaaagctgtagtagctttggaaacaagtagcacaaattcatgattttctcgagataatactgcaccctctgaaaaatattttgtcttccgaggattctgtatatcggaatcatagtcgtaagcgtcgttgacaccgaaggtcacttgcccaagttagttaagatcaggatcattccgactttggtttcagatcactcctacctaagcataaagggaaagatagagcaagagcaaacagtattgccggtatcgtcgacggaaaatcgccggcatgaagaatacccgaaaaatagagacaaggggcaaccggccaccaaagtgggcggctgaccatgaacaatattcgcatatttttcaaggaagtcgatgtcttgaacatatttgaagaatgatcaaggagtactgggctgtatgctgttgagaaaaggatatgctacgcaaaaatcatatcgtggatagagccagctcttatagattccaatcttgccccgccttaagcgcttctaatatacatcgttttggtgggatacagtattttaaaccacctgcttctactccgtactgcaaaggaagatgccagctcgaaattcacttcctattgatagtctactctagagtacaagggaggcgcacgcgtaatttacgaaatatacgaaatgataacaaagtacctgcatacgaaataaaaggctctttttgctcttttctttgagatagacatacagggatatgaggacagcgctacatgtaaagtcgagtttttgactcgagtcatgcaagactatagccaatacaagcggagttgaaatgcatggcaccataaaagtatgatgaagacccccgggatgattcagctactcctcgtagtgcccaaagggtgacttggaaagtgacctcgggcttgattacaaggattaaatccctgtaagccaccgcgcacgcgcgcgcgagagagagggggactcagcgtaattccgaaacgggccagctgcatggggataagcaccacatggtgctcgtatccagagcgggccgagagcccgttttacccgttacctgcatgccaagatctaagatactctttctgatcctaaccacgataaaggtggcttgcatgcgcattattcgaacctatcacatccatatatctatgttggtggcgggcagtgttggctgtattgtagagtgatactatcatgcaggtatcctaagaatcacgaggtttgactttataagcagccaagcaataagaatttcccgaatcctcgaacatgcttgtactacaatttatctagtcaagctggttagtccggttgagccaataggtgcactccaacatacaggtctgattgggcctgtaatacacgaagcttgagaaaggctgtaacattttgagtctattgaggtgctgggcagacctgcatgaagctgagagttcagccgcataacctcgccctgccataaatctactctttagcttccttcatactcctgtatttgttattttcttggatttgcagtgataatcatatttaatcgaatatgataccccaacgtactcaacctatcagaatagtggtggtagtgatgtactgggagttcgacgtttcccatgaaaggcaagagccttgggacgctattaaggctaaagatgcatgaattggagtatgactggttatgtagccatggcttctttggggtttcatgagagtgatatcttagaccgagtttgccgaggcatcctgcatctcgaaagctcgtttcacaaccccggttctagaaacaattcgcgaactagtccaaagttcgcgatttttggcgaatcgaagcggcatagattcgaagcccgtaatcaagattcgaattcgacccgattcgcaggaaatcgcaaactgcgaacagttcgaaacttcgtgcggagtggtacatcgagaggagcggaaaaagttggaacttaaagctcagccagtctttgccgtctagtacgcgccattgtatccaaaatctctatctctgctgccaagcgcgttttgttgttcagctcgagacctggatcggccgacatgaatttctcgtctccgaattctagcggtaatttcttgtcttgcatttccagcggaagaaggcccagtgcctcaatcaaccacatgaatacggggacacacgacagagcccaaatgaggaaaaggccgaataaagcgagcatcaaaaaaatgatcatcaatgcaaatcctggaccgtccgacccaacgaatcctgttgcacggacggaagctagaaaacatccccaagcggcacagggagcgccaaaaaatacagccagatgagagagcctaggcatggttggtaaagagggaattgaatggggattttgtatatgtggttcggggttgggccgacttatgtagacaacaggcgactcgtgcgccgctagtaaccggaagtcacgcccccggcccgtagtttacccaccccactcgggtggatgcacgactagcaggaactcctagactcatcagcttatcgttcggcacgaatttgactgtgtgcaggttgtagggcttgaatctagcgactatgatgaggcggctcaaagaattctcttgagaaagagttgttcttagccccaaaagaattatgggagatatcggtgatgagatcaactagaagatcatacaatgcagtccaaacagtcacaattcccccttataatcatattcgcgtaaagattatcgaagatttggaagccggaacttggcattgaagtactgaggatatatatatgtaattgaaacgcctcatcctcatctcagggaacttcgtcctgtcaattaagaaccctgtttccaagtcttctaacaagtcaatgaagtcactgggtacttaatcggctcggcagtaagacacaagtggccagtccaagtgcctccgtgagagaatgtgcgtcgagcaagaattcgaatttggcttgctcttgattacatccgcaatgaaatcgtcgggtagatgcctagggctgacttggctgcaaagagcaagggcatttcgggcaggtacaacatatgatttgaatggccccaaatacctaggcaggaggccaattggatcgaataaccgagaccattatctatctcgtactttgacgatgtaaaaagatgtctgtggacattcgtggtggtcaggaaggatataatgagctactgagcttactagaaagtagctctgccaggcacaccatgtaatgattggctctttgtaaggctagttcattcacttgacttcaaaccggaggtgtacgtagttgagtacgtacttccctcgagaaggacccacatatcagaccgtgctagcaatcccatgtgcttaagcgaattgcatttagggaagatccaggtttgtgggaaaagacaaaccaatcacttcatacggcacagttttataaacgatatatcccccactctaaaatacctataatatctaaatcgatcgtactgcaggcaggcgcagagctgaacttcctaggactcccaattggaacaattgttgacctatcaacggtagaccgtggcaccccgcctccctcctagcgaagcggttcgcgagcgtctccatgagatgggcaaggaggctgctagaatggaatggcgagatccttacgtatcgatcgttccgtcctggattaggagactcatgccccccttttattcgcgccaatatcacttctaagggctcgatggcaacgagcaagacctgactgaaaggggtgaatatggtattcgacataggtgcatatcggactattatcgctaaagagctcctctaccccacctttcgagaatacctgcgggaccctatgaatagcaaacttaatgaactttccgtgaccctccccgcgcacagtacctggaggtctgctatccaaactgtggtagcagccctaaacgatgtcgatgaaccctttcttgtaataccgcgaagaagcggtaaccgtcgtgtttttacacaattgttctaaggacggagcgagatggggaagtttgaagaggattatctcttcagggtggaaggtcttggttcgatcgagctatgaggcgcgttcaactataaatcatgccttgttaaccgaagaacgcagtagtccatttttagagaccgagtgattccagaagaacaccaacactgagaagactcgtgcggaataaagaacggctaaagttcatacaggacataccaaaacgaaaacatgaaaaatccagctcctgagacagaaaaaaatgtagccaagcgaggtggtagcagcaagtaataaacaagagtaaaaataagccactcttcgcaccgatacatcgattcaagcaaacaccatccaactaaagaatttcaaattgagacaagctcgccgtccagattggcatattcctcgactaaaatgtctccccagagttgatctgagaccccctctcccctggcgagaagtacatgccgaggaatagcccgaaggctaagtcgatcaatacaggaaatttggccgaataaaatcccaactagctggttgggcatcttggccttaggcagaataagcgcaacggcgtcaatgctagtacaggaatttgacaaagccagactagaatcaacctgcacagctataccgtcaggcgagcgatataagtcgtggatagggtcccgcaagtattctcgaaaggcgggggagagtagctcttcagtgataatggtccgatgtgcacctgtgttgaacaccatctctacctcttcaagctcgcatgtcaggtcttgctcgttgccatcgatccctttcaaggtgatatttgcgcgaatcaaagggaggcatgagtctcctaatccggcatggagcgatacataaggatctcgccattccattttggcagcatccttggcaatctcacgcagacgctcgcgaaccgattcgctacgaggtggtcggggtgacaccgtccccaggtcaacatttgttcggattgggagtcctttgaagttcacctccgtgcctgcctgcagtgctatctcacgaatagctcggcggttaccgcatctgcgcggcattacaagaaaggattcgtcgacgtcgtctaggtctgctatccaagctgtggtagcagacctccaggtactgtgcgcggggagggtcacggaaagttcatcatgtctgccattcattgactcggaaagctggcggagaagttctctcgggtgcagtgttctttcttcggtacccatagttgacctaaagaacaagattcataagttctctgtaagattatagatgcttgtttgatatgtacttactcttcttcctcttcagcctgaaggcgaacacgtttggtttcaacagcagctactgcttggctgcattcagagtagggtcgtttaaaactagccacgatgagctggtatcagtgattgtgtcaaaatattagtaggtgaaaggctgcataccttacgtcgcgataaacgtagtcgttccctcttgttcaaagtaggaagccgtgtcttttgagtgtcgataaggcaggagcaggatcgatgacagaaaactgacgacagagagtgaatttctatttctcggtcgggtcgcactgggaccaacgtaggcccgcaacgcactggccggctaagtccgttaactctgacacaacatccaacatgggacacatacacgaccctaaggaccctcataaagcggcagcacccgaccaagaactcgcatccgcagcctaagatccggtatgaattacatgctgctgcatatgtattaatgcaaaaataacgtctccctgccggacgggtgaatatgtacggccacccggtggagtacagtcacagagcctcatccctagcctacaatataatccaccaatcaccacccgcggtaacattgacgctttgcccgggtgtgtatcgaacaagatgttgccagatcattgcgcaaaggcaacctttgcaacaacctgatgagcggcatatttccgtgatgtaaagtataaatgaatatattactctgtacggagctggacagtacaaaaaagcataacaataaaaaatgaaaaagcgaaactaaaccttcttcccagataacacccgttcaaaggtcgcaaagttgccttcgttcttcgggtcatagacagcaaagcacacctcacgccaccagtttccacaaaactcagtctccctcagaacctcgagccagcagtgcgcaacctcagcagggggattcgcatacaccccacagcccaaagccccgaggactagcatcccatgcccattgaatgccgcaatacgcagtgcttgcctcatcttagatttggtaagtttgcggtccctgtcgcgcgcgaagacttcttgggtacgccgacgggagggcgagggtgaagtcgagcagtggcgtgagctgtggtgtgcgtgtgggctatggccacgtcgctctttctgagaatctttcagcaccactctccggagtataggtcgatagagagcggcgattgtaatcccgctgacaacaggaagatcttctggtggagtagtgggagactctaacaaattgtgtccggaggctaggtcactccgcatgaccagaacgtaggggctgtagatggactcgtctagagcgagcgggtaatccctgctgtggaggctgagcgccagtgagctgcggtagcagatggattcctcttgtgccatcgcgccatttagccagcccccacctggttttcggtagctagcgaagttgataattattgggcgggggttcaggcttggatcgagacgttgtgtccgtgcggactcaaatagtccgacggccacgttgagggtatcgtcgttgatgattttgaccgtcgccggtgatgggaagcgggggcagtcgctggggtgtaagcgtctgaccgaacttgacgataatttcttagatttgtgggcctgattggtggagttgagccggttcagaagaactgagagaacgccgatggtctcctgggccgttcgcctgagggcctgcctttggggacttgcttcggtatcttcgtgatggtgatgggagtgatgacgtgatgtatgccttgggcttgggatgagctgattttcattcaccatgtcccataatcttgacttgatgttttgggaagacatattttctgtcgggtattgctaatttgatgtcggagagagagaactgatcgtatttgaaccagcgctagcgtgcactatacggcacccttctcaccagcggcataccccgggcaggcttaatcgcgtattccttcggtttctcctggaccttccctaaagttcgtgtaatcataaatgcgaggtaacagaataatctcggattaacagaacttaaagactctatccacctacttctagtggtaggctacggaaccccgtatcatggaccagaggttaatcccatactacgacattaatcaatagaaattaatacatttcacgtataactaaataaaggtccgaatttgacaatccggtcggacataattaataagcaagcgcataactcgtcaaagtcacatgcttcggcggtaaaatgaccaatcaaaataacacccctccagggctgtttcttgacagaagtcaaagcaatttatgcaggtcaacgagcttagctgtgttggtattgtttacagtgctgtagcaccgaatcaagggcctagtgctgcggcgggaccggtgctgcagcacttgtcactcatctcggtccccggtgatttgttgggtttaggcagctggtattgctatcgtgggtaaggtagaagggtggcgtattaggattttattgaatatatgaatgactgcattgtactagagagggaaggaggggttatgtgcccccggactatcagagattgatatatattccgatacttcgattataatgtgttattttgctatgccccttcgtaaccacgtacaagtaattactagtaggggatagttattacctcgacctagtggcctagttgttaccatcttcatgattgtctactatatggctctaccgattggcgactatctgtttgcctgcttgatcgtctgcttgctcgcttcctatttgcatttgttatttctttgcttcatagattgtttgctcgttgagtaagaggtccgaggtttgcaacatttgaaaatggtcagctatatcaacaggctgcctcccactgtgcaatgggctacatatggagtgtggttcgtctgatttagtggacggaacatgtcacccgcattcaggaaactagaggcgcaggacgaaggttaccactagtggcttacctgtcttggctttcaatccttatacgaacgcaacgcttgctttgcaggtgccaccaacaaagatggtattctcgacctccagattaccaagttgtcgagccattttcttgatcatcttctctctagttccatataatattatcaaatatagaatattcaccttcaaaacgatgtccaacccaggatatcccagcgcttggaagccgggcaagcccccacgaagcgtggttcgccatcggcggggcccacctctattcaatactctcaccgcgacggcctatgatttgcagcagatgatgattgccggaaccctgaagagtaccgatctggttgaggagtatgttcgaaatattgaggagcacaatgggtatcttcgtgcggtctctgtatatgcgccagttgcgctggaacgggctcaggaattggatgctaagagggaagccggtgaattcttaggcccgcttcatggaatccctgtttttatcaaggtatagcttgtccttttggtcagctcttggtcctttcatttggctgacacaatcagtgggccaagcctggagatgaagacatccacaggagcagtggcgctcctgaatacaaaatccaccaaaaatgcgcaggttgccgacaaggtaatctatttgccccgtcaatagctgtttcgaggtttcaagtctaattattattagctgcttgctgctggagcggttattttgggaaagacaaccatatcagtgggtacccagagagattcaacggagaatccagaacggcacagctaatgcttattcaggagctaagctatcgaaagtaaaattccatcgacgggttttcttcatgtttctttttgtctaacattgttactagaggaaaaggtctcccatgcggttggtctgcagttgacggccaaggacagtccctatattcctgggggattcgatccaaccgattcgatcggagggcatactgtatgttcttattactcgtccctagagcgaggaaaattgctgatacatagcacataggtacccggcggctcatcctcaggagtttccatcgtcatcagtgcaggtcttgctgctaatggagttggaacggataccgatgcctctattaccgccccggcagttagagcgtctctgtatttaattcgaccgactaccggaattgtttcagtaaatggtacagtcccgtgcccaaagacttttgacaccatcggcccaatgggtaggagtgttcgagatgtagcagacctcttgacggctctcgttgagccaggcaagacaaaaaccccacaaggcggttatgcatcctctgctaccaaaaaccatggaaagtcattcaggattggtacgcttgatccagaagtttggaattacccagatttcttagtcaatcccgtgcccgaagctacagagcgaattgtaaggaatcttttccaagtatctatgggttctatatctaacagacttatgcagaaccgaattattctggagacatactccaagattcgtgagggcttggccagtgtctttcatgagaatgccgaccttccccctgtttcagaattcatgctgaacgggaaacattccatctacacctcttgggtatgtcttttcgtgactttacgaactattggttctaatagacgcagatatcgaatgagttgatgttctcaacgactacctcagcgagctgccaggatctcccgtgaagaacttagaggaacttgtgaagtggaatcaggagcacgcagcagaagcactccctaccggtaatctcccatcaggtaactcatagataatctctaattctaacagaatatccgagtcaggatgtgttgatcgaagcactaagcgcgaagctgtcccccgaccagattgagacgctccgtgagcactatttagccgtaggttcaaacatcgacgcagctttacagaataacgaaattgacattactgtcgcccccggagattgctttttgactcaatatgcctcagccaaaggtacgatgttcttcccgactacgtccaactctgttcgacctattgggctgcaggtgattagttctgctcatcgtgaggaccttcttgttgccttcatgagtgcctttgaagattcgatctcgaaaaggtagcccccaactgcgttccttcaggcctcgaaggaatatagcaaacaagctctaccctagcagagaaaaagggaactttgatgaggcttccaaattgactgaacaggcggaagtggagagcatgagaaaggaaagtcagaagcatcgagtcggatgaagagaaggcatatatgagtcatgacatccttatactggtgaaattcgccacaattgtcaggacacaattctatttcgcaaaaatcccctttggttgtttctttctataagcacatacacgccaggcttgtcatagctacgtcggcgtagaagtggtgtgcttatataatattccgtactcggcgctcaggtccggggcgtgctaggaattacccagtgagcaaaaagcggcaagggctagatacctaaaacggaaagagaaagccaagaagtggcagaggaaagagctacgtatgttgtatgccatctcaatatctcaattgtataatggagaacccaaacctcaacgagatccatgatttcctagtctcattggccttcaaggccggggacatcatcaacaatgcactcccagaaatcaccggcacaggatccaaactgaatagtccgtgtccatacaaacaaccgaaaaaggaaaacagctgatatctctaggtgccgacctcgtcacggaatatgaccgcgccgtcgaaaacatgatctcgacctcactgcgggagaaatacccacattacgagtatgtgttttctcttcgtggctgctagcatgcttctgatggtgtgtattctctcagattccacggcgaggaaacgtatgacccggcacgcccattgaccgatgcgcctacgttcgtcgtggaccccatcgatggaacgacgaacttcgtgcatggttttccatttgcctgtgtttcgctcgggttcgctgttggacgcattcccgcggtgggggtggtgtataacccctccaccaaggccctttactccgctattcgaggccagggcgctttcctcaatcgtgaaactcgcttgccgctgaaaggcgaccatgtcgagcccctgtctggactagctaatgctctcgttgccattgaatggggcgcagatcgcagcgggaacaattgggagactaagattcggacgtatgagaagctgggtaagtccaaggaaaatggtggggctatggtgcgcgcaatgcggagtttaggctcggccgcgttgaatttatgtgctgtggctgagggcacgctggatctgtattgggagggtggatgttggtcctgggatgtctgcgccgggtgggttatcctctctgaagccggcggcattatggcggatggaaaccccggggtttgggaagctcgtcttgacgggcggaagtatcttgctgtccgaggttctccaggcggaactggacaaaaggagatcgtggaggagttttggagccatgttcaaggtaaattgaagtattgatcgcccgcccataatcctctcagactagttgaatacgacagacagtagaggtcataattcaaatgtaacattctcataaatacagggtatatgcctaaggaaactgtatgtacaatgaaaccaatggcgctatatgtgacggaaaccagcgttggtcttcacttcgaagccggactcgctgtcatcctcgacaacttcacgatcagtccatcgtgctgaatcctgactcgatacaagatttctgtcacgggtgcctatgtgcgattcatcttcggcccttgagatatcacttgggccagaagatccatctttcgatatatggagatcggatacatttggcaaattgtctgtatctcttattgactttggatcgacaggatcggactgcccttcaacctcgtcaccagagctagtcggaccaacatttggagacttggccatctccatattttgcttcagagaatcgtcggtttccgcagtgagagtgtggctgaagtgtgtatcaaccaagtgcttcacaacaggccagccataggcattggtgaacatgcgccgcacaataatgttattgtgggcatcaggctcaagtcggacaagaaccttacgccaagtcagatcacggtgataggctctcgcgattttttcttcgaccttgaggccgctttctttatctgcaggcggattctgagagtttgattgcttgccctgtggcgaaccaaatgccaatatgcgtcgttttaccggtaaagggggtggtatatcctctgggtggtagatgcggtcgtggaagattgtccggggtcgtgaggcagggtctgaaatgaattccgcgggtggtaaaggcggcatcaacaagtctccagcacactcgaaaaatgttgtctttggaggggtgtgcattccttcgtggtcatggtcatgattaatgggcattgtgctatcgctgtcgccagtctcaaaagtgctcagggtctggctacgcttataaattctagcattcttgctattggggggattcttgttctgagttgggcgaaacagagaaaaaaagctgtccatgggactgtgagaggtatttccagggatgttttctttcagaacaccttcctctgaaactttgttgctggacacatgactggatggtgccaggaattgtgccggcctcggggagattgtatcttcgtcagagacatcgtctttgggccttgggggaaccttggtcgcagaatatgcatgatgatgaccggcctccattgggagattcaaaggcaactctccatcgtggcgagcaagtcgcggggatttcgagttggcgcctgtcaactctgcccacccccattcggccatggttccaacaagtccattgtccctcctcgctttttcaactcgatccaaacctttccagtccaagaacaaaagagaagacgtccgcaaaggaacaatcccatcattcaccacattcgaatagactgtgcggtgctggaatttcttaagaacctcgtaggcaggaccacaaggaagaatccgaagaagtggcttggagccaggatctgaatggccggggtcttttgcagactctcctcttccagcaataatggcaccccagccacttcgaactttcggtgccgtccaactcaacccgagatcttggccggtacgaccaactagacctagatccaatgcaaatcgaacatacattggattctcattgctgagaccaagaaaaggggttgcaagggcaataaagttaacgggtctgatttgctcaaagaactgaggcgagtgcttctggatatatgcgattgcatatgtctgaatcagcccgccaagagaatgggcaatgaaactaatgcttgtaatctggtaagcatggtcttcatcttgaaattcatgggcattttcttgaggggttgattcagccgaatgagaaaatggttcagctcgctccttgcgagcactaaaaggccgggcaaatgggctcggctttgagcctctgagagggaaatagggttgatcgggatatgtgagaagcaggacatatttggccagccgtttgccgaggtattgaatcccacgctcagtccgaacagcattgccagagaaccctctaacaatgacttgctcttcatcgtcatcgtcggagttatcaccagactggctattttgctcttcagtatgactggatttactgctgagaaaattcgggattagaattttgagacacctaaacgttcagaaaggaattccataccttgtcgggttttctcggtctacaacagggctagcatggggatctctggcttgacgtttattcttcttggaatttctcatgcctgtgtcaatgctctccttcaaatagagcatgtctgcaccgaggttgctgtgcaacccatgtgtcagtaacacgagatgcaccttcttctttttggcgcttttcatcggagcttccgtagactcctccggtactggattatcacacacgggttgcgagtcatgactcttccgttcaacgcttttggaagcaggcttcgctgaggggaatggcggactgctccatagactagttgtatcgtcaacttgaagagcgattgattttgagtacacgcctttcgaggcaagcacctgactacctctagttccaggcagccaatggtcttgtaactttgccggaggccctggagagctatttccactactccatgtaccgcccgaggaatatgccagcgacttttcatcacgacccacaagaagctcaaaatgcaccgctgcactacttgagaatatcacctgcgattgaatctcaacaatccagctaacgctatgtccacttgccggtccaccttgacccggagagccaaagtcgtgtgcttcctggaggttagccggcaccttgatgacggcgtcccaaccacctccggccttaaggtagggctcaaactgcggtgtaccctccagatcctgtcgctcatatttggtgttggggtcgaactttgtgggatagcacgcggcgtatagcgtgtacgggccatggaggtatgcggcgcgcagtgggatggcagatgtgttcttcaccctcacgtagagatttgaagggatgggcaggatcgggtcggccgccggagtgtacgtaaccgtgtatctgatggtcggtttactattagcaatccagaaggacttcggactggagaagcaagaacgactcacctaacgacttccccaacacggacactaccaacttgatggattaacaacatgtcggtcggttcctttgtatccaccggaattgtttcccagccggagaaggtatgaaaacgcgacctttgattgctaggctgtgctgcaccttggtctggggtctgggaggccgaataggtgcgcgcagtgatcagcatcgaatctaatgggcagttccattataatcaagcaaattccaaggcgctagataagagagtctagcgagacaacgatatcatttgctggagcaccccatatgctgggatgggtggagtgtggtggtttacggggtccaatctcggagacggcggaaaacacatgatcacattccttttaaggatcgacaactcataggccttgtttatagccatatacaatgctctctttagttctaggctaatacatggtttctatcgcaactgaatgaacctccgcctaattaatcaagttcagcaaacgcctgggttctttagaaatttccatccaaccgttcctttcgacagcgacgatctttccatcaatgcatacgcgtcgccacctctcctcctcttcttgaaaatcgattcgaacctgttcaacatcggcataggtgaccgtgtcttccttcacatgttgaccgccctggtaggctaggatcatcaactgcattgcatcttccgccggcataggaccgaagcggataaatttcatccgtccatccagggccactgagtccggggagatcaagaagtccttctcaagccgtgggacgagtgcagtaagtgcatacatgtgctcaagcccttccactgcttgttggcgtgtctcgttcggaccattcaaggtggttaatgtgattttgcctttgaattggtgaggtggagtaccgtctgagggatgaagtagctcatttgcggccatattgaaccgatcggctccaaatttgcgatactcggacgtgtcgctgtcggcgactaatgcagcatggagtccccagctcgcaacaacggctccgtataatgtgtgattaacatcggtgtcgatatcggctcgatgacgaccttcatcgatgaccatccgactgccaagtgagaatttggcagcaaagaccggtatagaagatggactgcctcgaagtagtgttgaaagacccggcaccgggccagatcgtaatccaatggaacttgccatggcattccctgtcccgcaaggaatcaacacaatattgggtgatacaccaatcgatgtcttggatttgtagaaaatctcgagaatgtcgatgagggccccgtcgccagaaagaaggatgatagtctgagggacgccattatgagcccgctccaagaatttcgagcgtgcaagctcgatgatggtttcggccgactttgtttcgtagagctcgtaattctctagaccaatatattcaagaagcggctgtacaacatcttgaaagactgtcttggcattcccggttcctgatccagtcgataccacaacctggatgacaggtgtatcttcatgtcgaaggtggcttgggatcttggtcacaaaaggagatagttctgcaggcagggactcgatatcgatctttctcaaggagaagttctcaggcttgtcgccgtccagttcggttttctgaaagaacagcacactatacgtgggtacatgattggacaacacacagagaatgtcgttgaactcaatcaaacactcaacgcctgcgtgagatgtgtatttcaagttgcgatcaactatatcgaccgggaaaggagcagacatctctgatatctctgagtagtagtgtagtgggagagaaatcaacagttccttgagagggcggggttgacggcttacccggactttaagccatgtcgtactacttgggtaaaaagacgacagactttctagcagaaaagtactatgtaactatgtattatttgactgtcgctttgtaaaaattgaaatgcttaactacttggtcaattatttgtcaacatatacataggcaagacacccaaatcaatgattcccattaggtacagtgagggaataagatggttgaactcttatactaccagcaatgactctatatatatgagctaggtatgggcgactgatgggacagtctggtatacaatgtaggaatgcttgtccgatgtggatgcacgttggaatatagaaacgtagatgtccaacgttggacgtaatcaatttgagattgctagtattcttcttgctacattgttctactagatacataatacagatacagcctcgacaagacagaggtacacaagaatcaatgaaatccaaatatgccaatcacgaaataaagcaaaaaaaaggccatcacaaatacaatgttccccgagatatcgacctcagtcctgagttggggaaataccacgtgagggtgtcggtgaagtctcatgagagctatgcttgtcactgaggtttaccgcaatgaaggtcttgggtagttccacactgcatgcagtggtcagtaacaattcagggggttaaggtagcatacaacttacgtgttgaatttcgctttcaacgtctcaatcacctccttccaatcctggtgggctgtcaggcttcggcgcggggtgcagccgatggaatgcctggaatcgagttgcacgtcaagcgggtcgaaggcatgacaaccagggctgactgatatgcggatggagtaagagtaagagtccgattcactgtcccgagcttcgtacagctcaaagcaaatctgagagagataatcgagttctgggatggcactcctagcaatcttagtttggattccaccttccaagatgcagttcaagagagtgtagatatgagattccttggtgaagtagaagaaggatttggcatcctgcgaagcttgcacctcttctagatctcgaacaatttcctgaaggaggggaagagatgttagaaggccaatctcgagtttctcgctgtcggtgattccatattcctggggagtcacgtagtcgaacaaaaccttggctagcttgtatagttcccggagcttcgaaagccgctcatccatcttggacttggtggattgggagccagggaaaagcttgaagtaatgatcgtatgaatcatctagtgcccgaaggtgcggcagtgactcgggggcaaggacgcgtttcttcaaaccaaagcgatgagcaaacgtctggctttcggtgcgatcctcggatttgtcgttcccggcttcctggtcaagtttcccctctgcgcttgcgtctggctttgttacgctattgcttctctgttcttcatcgtagtcacgggtactgtcctgtggcatgaagacccattccaaaaacggtctattgtggagtgcatcgaatttcatactgtcgtatagctcggaaagcttgctcgggtcgaccttctcggtgtcacagaactccgcaaagagcttttcccaccgctccttaaagagtcgaggatcttcgcccgcgcaccagcggccctgtacggtggatatatcaggggaatccactcgatccacggaggttgtttcagggtcattgggtggagtcgggaagatttgcgatgagctgtcgagtttctcaaagttgtgtcgcatgacactccggtggaacttcatcagttcaactaccctagcaaggacaaccgaaggctctgggatatttttgtccttgggccaagcaaattgtgaaggtgcagacccttctcgcaaaagcaatttcagcttcttcttgactttgtccatgacatccttggcggcatttgagtcatcaagcaaatctttccgaacttgaatcaagccttcagggatatccttctgatccaaaaaggagcatgcccatatttgtgctgtgagaatattattagcttgatccagatcatggcaagggaaatgacttaccactagtgctcactctacgttctgagctggtgaatatacgaacgttattcaacgcttccttgttcatcagcttgagatcatcccgcatgttcagtccaagatcctgcgattgataacgcgcggcatgtgtgggctcgccaccccacttgatcacaagctgcagtttgtccaggatcaaatcgttctcggcggcagagaaccgagaaaaagtcgcacctgagatagaatcacttcgtgactgtgatctacgtaaatcctcgttctctggagtgagtccctccccttctttgggcacagttgtagtggactctccatagagcttgcccttcgacaatggagttgaagctctcactggaggttctcccatttcttctggctttcgtttccggaacattggcttgatctgcactttggtaccaggccaacctccctttttgtctaaagatgcgcggagcaacttgagcttctccttgtcttctaagcccttctccatagccaccttgacggcatcagaaacactggccaatgcggtttcccccttaatcactatctcattctggtgccctttcagcaagtcaacgaaaggttggctgtggaaagtgaacttgaacttttgctttggggtccgatctgcgtgtcgaatcactgccaccatgcccttcagcttccaagagtgtttagaagcaggaagaggcggaagggcttcgtcattggcgtgctgtaccgaaagagccggcgattttgtgttcgagggaccatgattagaggagtagccttcccgggaattcagcttgctgagagcagcgccaatatcagcgctctctaccccagatgacgccagtgatggacgacgtgactctgaaacctcggtgggtttctgggtttggccgtaaagcctggagttgctaggagacttcagcaatgtctttagagcttggcgatgagatcctgccgtgctccttctggatgagcctaaatccggtgatggcggctcggaggattccgatatcccttcgcatttgcgtctttcttctaggaaaatatccctgaggatgttggcacacttatcgtaataatcattgttgtccttgacgaagctccagccgttgacgtcaatgacatagcttttatctcccacgcggagcatgtcaaagccacagattctttgaccaaatccatttgaaatcttcgatgcgattattgcctcctccttgccaagttttgtgatgtatcgtatttccttcccgtgggtattgcgccgaacgagaccgtcgacgacgggagacttgcgcgtctctgcgtgacaaaagtttggcccaacggtgtaggctttgacatcttccgcattgtcaaccctgaggaactgctcgtatagataactagcgtccttctcggtgatggatcttggaacagtgagattgggatcatattccgaacttttgttgccgacctttcggaatagtcttcttccacctccgccgtaatgttcatcgttggggaaatagatgtgaatgttgtggtcctcgccattgacaggcttttcaacaaagggctttttgaacactttgccatcaacaatcaaggcctcgccatcctcggacattgagacgttctgagtcagaggagcaccaccaccaattccgttctctgggccttcgagcttgaccccagtcaggtgatagatatgctgggccagctctggcgattctagaaccggaccgccatcgcggttgacctctatccgcttcggggtgggaacacccatgtgatccagaatcatcaggcagagccgccgatcccacaggaccttttgcataggcaggtcattaacacatagcggttttcgaagcttagcatacgcaatggctttgtccagggggaatccatcggaaaagaaagcgagcaagaagtcacacacaggccaattctcgactgcttcatcgaggataactttgtctccaaaaacaatcacctcaaattcgcctttcgattgcagtcgagtcaagatattctggctcggtttgctacgtgctttcacatccaaggcacagactccgatcctccatggcttgagggagccagattccgcctcatagatcgagcttgcagcggtactggcagctgtgcttccactgaaccttctaggtgcatggcttaaggggcgtgtagattgtcccatccgactgccggagcgaggatcaaagcccgaatcggcttttcctgattgattttgtgtcgattttgtgtgtgacgtaggcttagtcgaagccaatgggggttcgaggacgggccctgtgggcgtctgatcgttgtaatcggagtccatatcaagtaaaggcgacgaaaggttgggttctgcaggtctcaagggttcagcaccggctgaagagccgttgctgtgctcagcggcattatccatatgaggggtcaattgtctgtataggattgggttttagatcaattaaatcgtatgagactaattttgatcaatgagatggggattttaaggaagcacaaaatctttggtagcagttcggagaaagaagcgcagatcgagcctggaagctcttggattccaaggttgtattaccaaatatgattggcctcccgcatgggcgacttttcgctggtctaagtttgtatattttcgctcataatcagactagagggctgggaaatggtatgtttattgtgtattcgaatcactgggcttcctcgtattcctataaagtacttataatatatctaaaagtacatatgcccctacccaggtacttattgtagaagtcttcactacatgataacacattttgatagcattttggctatacagagcagtgtcggataagattgttgatgcatttgtgtttgagaatacaatgatttgaacatatgtaacaacgaagagtgacgttaagttaaagatatcaaagagatattccggatatgctcatcacgtgaaggtattttatacccggggaagatgttcacccgtttgaaggcggtctagtgcctgcaggactaggcggggcagaaaaaaacatcaaaaaaaaaagaagaccgagctagtgaagacgacggagataccctttgtgacttgatcaccaagtcagaacggaattatcactccaaaggctaaggggcttattctgattactttggatcctacggcatatccattgtcgttagtgtgtccctcgatatcatgccttcttcggccgataatttcgatctgcctcttgcgaagaggcagaaacgggtatcacaggttaaggctgggacacatggttccaagatctttgctcctttccgtgtaagttgggggagacattaaatcgcttcttttctccaaactgacatgtcgctataaagacactaggattggtgtcgccaacacccgttccctttacgtcagtgcgcctgggtaaatcgacctttcaaatcacaacctccgtgggacactcgctgcagacttatgatttgcgccgaggtctgaacctcatctttctgagtcgaccgcaaacaccagagatcattacggcaacatgtgcgtggcaggataaggtattcgcagcttggggccatctccggtcgcagtccccaggaggcgtctgggttttcaagcgcggcaaaagagttgcagttcttgagggccccgcagacctgaaggggcccattgagcgcttggtggtgtttggctcatgggtggttggttgctggaccggtggcctcgaggtttggagaacgggcacatacgagcactatgccagtctgcggccacaacccgctcggggttcctctggagagaagatctacactggggtaatgtgcaacatgccgacttacctgaacaagatattcgtgggccgatcagatggagcggttgatatctggaacctccgtagtggaaagcttcttcacacgttgccctccttgtcggcagatgctgggcccgtgactgcgattcaacccacacctgctctatcgcttgttgccattgcctataagggcggtgcgttggctattcagaacgtgagctcaggccagctggttttgtctctcaagaacgcatcatcccggggtctcccagtaacttccatcaccttccgcggcgacggattgggtgctggtcacgatggtcgcagctcaggtgttatggccacagcgtcaagtggtagcggcgatatcacactctgggacttgaataatggaggtcgcattgcaggcattcttcgtggagcccatcgagtgtcaagcggcgaaaagcccatgggcgccaaccgtgtcgagttcttggatggacagccagtgatcgtgtcatcgggcgatgacaattctttgaagacttggatcttcgacgagacgccgttctcgcccattccccgacctcttcataggagaaacggacactctgctgccgtcagcgctcttgatttcctgccgacgtcttcggatggatccgagtctggcggcaagtggcttcttagtgcaagcaaggattgcagtctctgggggcttagtctacgcaaagacagccagcataccgagatctcgcagggtagcttggaacgcaaggctaagaaggcagggccatcgaacatctcaaatacagaggatctcaaagctcccgaagttacatgcattgcctgcagcctcaaccgtgatggtggaatgggagtcaccacttccggtccgatctggtcgaacccgaaggttacaaacgccgatgcttccaacgcaaccggctgggaaagcgtggttaccggtcatcggggcgacaagttcgcacgtacttggttctggggcaaaaagagagcaggtcgatgggcgtttgcaaccagtgatggaacagaagtcaaggtgtgcaaattcttaaacatgactgaacaattgttttcctttgctaattcattcctcagagtgtgaccgtttcgcaatgtggtactttcgctgtcatcggatcagctgggggttctatcgacatgttcaacatgcagtcaggtctacaccgacaaagtttcccagctcgtcccccagctggccgtggtaccaaatccaatgctcagacctcgatcactgaggctactagacacaccaaggctgtgactggtttgatgattgacaacttgaaccgtaccgttgtcagctgtggcctggatggcaaagtcaaggtacaccccaccactccctcttttctagagattcgcaaactgacattttctggaatatagttttgggatcttctttctgggaaattcattgatgaactagactggcatcccatggctgccattactggacttcgctataacaaggcgagtgaattagtcgccttcagctgtgacgacctctcgatccgtgtgattgacctcgagaccagaaagctcgttcgtgaattctggggatgtgtgggtcaagtcaatgatttcatcttctcaaatgatggacgatggattattgctgcctccatggactcggtgatacgcgtatgggatatgcccaccgggcatttgattgacatcttccgcgtctcaagcacatgtgtcgctctgtccatgtcttcaacgggtgaattccttgctaccgcacacgccggtagcattggtatcagcctttggagcaaccgcagccttttcatgccgatctcgaccaaaaacctggacgagaacattattgagaacgttgggcttccggcaacatcgggagaaggtggtgctggtcttattgaggccgccttcgtggatactaccgagcaagatgaggcagaaggcccagtactggccacggaacaactacaacacgacatgatgactctgagtcttgtccctaaaagcagatggcagtcattgattcacctagacactatacgggtatgtttctatctctgcacgggtatgatctctagctaacagttcaataggaacgtaatcgccccaaggaagcccccaaggcacccgagaaggctccgttctttcttccttctctgctcagttccagtggtcccgaggccggcgaaatcgccggcgccgaggataccgatgctggatcgatggtcaaaaccgccgaagccgaaaggttgcggattgccaagttgcaaaatggtggaaaccccggttctcctcaatctattttcacccgatcattggcatccggccatgattccggtgacttcagctcatttatcgaccatctcaagaccttatctccggccaaagcagatctcgagattcgttctctggatcctcgggtgcgtgatggacactctgagttgtccgatttcgttattgccctgactgctcgcctgaagtcaaagagggactttgagcttgtcaatgcttggatggcggtctttttgaaaattcacgccgatactgtgagtctcagctctactcaagatgagcctcggtatcgtctattgcaagatgctcttgcaatttggtctgacgagcaacggcgggagggaaagcgcctggctgagctggtgggctactgtcgcggagtggtcggattcttgcgatctgctcggtaatttgaaatggacagatctatacttatgtacttactggataaatatctcgggacatgagtgcctttttttctttgttatctatcacgcgtgttacgttgaatctatatgcatttgttctataaatccagtgattttgcaggaatttagggaacttctgcatcctatctactttgttatcatcttattttatttccgcaccttctaattctattcatatatctcaatttaaggaaagatgagatcaatattccaagttttctaggttgtccaaacttggacctccggcgtcttaccaccctgactaatacggatttttttttttcgagaaacaatccacaaccacgacaagaagggttcttccacgcattggctatggggatcccccatttaactaggcacttactgccatatgccgaaagcgtcttgttagatgggagggcgatcgattcagaacttccgcacatccaagccgttgtcattgacgggcccagcctagtataccatgtctaccgtcgactcctgggctggatggacccaagcagtgatgtccttgactaccagccaacctgcgacgaaatcagtcgcggggtgagcagcttccttctccaattaaccagaatgggagttaaaatgtaagcgctcacaactagtccgaaacacagctatcctctgattatcattttcctttctctctctgtcctttagacataagatatgcttcgatggtgccttgcctatctccaagcgaaaaatccgcttttccagaattgaaaagttaagacatcgactagaattggctcgtcgaaatttgtctctgcctgctacgcccaaatgtcgcgatgtgattccgactgaacgagggcaggtctggtgcagtcgaggcttgccccagcgacgaaaaggccttccagagaatcctttcatggtaccggcggtcttcgaggacctgctgaaccgatggagcaaggaacagatccggaaagaggttgacgatgatatcagttgccttgtcaccgatgtcaatcacccctgggcggaaatcactgtcatggtgccaggagaagcagatgttgagtgtgcccgtgtggcaaaacttaccggctgttcagtgttgacggatgattcggatctgctgcttcacgaccttggtcaggatggctcgctcttgtttctagactcggttcaaacgtcctcgggcgtctgggatccggccgagccagatattcgggggctgaggatctgtccccattcgctctctggccgattgggcatcccaagcgttcagtggtttgcttacgaattgcaaaaaaatgcccacctgcgttttgctgaacttacccggatatctcaggagagcagtaaggcgactgagctctcctctgaatatctggagtttcttcaagaatatcatgacgataccactgataacgcggtgatacctggagcagagcagtccgtacaactgttggatccgagggtatcggagttattttggcagtatgaacttcctagtatttactgctcggatgaacagccacacgtctatctcgggattttgaacgaagatttttccagacgatgtgcctgggaacaaggtcgaacatataggtcccttgggtactcatttttcaacctttcccgtcttgttgtcaatcgatacgcagtcgtacatgaattcgttcgcaggggtggaaggatcgtggccgaggagatcactttaagcggaacaaagaccgtgatctccgacctggatcttctccagaaacgtcttgcgctagcacacgctacctttgacgacggtctggcagcggagagcttctggtttttgtatgctctttccgatatttatcgtgatggatccggtacaaccacagttccaaatgcgaaggggttggagagctttcttaaaaatggatatatggcgcgaagtaccgaatgggcggatattcaccttcttgctcaaatgcaagctgcactgtactctttacgaatactgaagcagctgctcgatatcgcaactcctggtcttgacttggttgataccagctcactactcgcggatttacctccactacacataatgatgtcgcgacagaagatgacccagagctttgccaacactcgtcttgtccggcatgcggtttctaaattgatagaaacgtatggttaacaaatacaaatctacattgcaaacatgcactagtacttcacgaattagagacccctcaggtaatgactattatcagctaaggattcggcattcatgcggtttgtagattacaatgacatttgcattggcggtcgccatagacatagaagacataaatgtgccacttgataaccttgcctgagaagccccgggtccttcaaatgattcattccattggcatataggttttaaagtactagaaccagccctgggaggagcgatgctgctggttctcgatccagtcgttttgtttgatcggatacggtcgattgacagaataatcttgtcttgcggtcgtgcgtgttgtggttgcctggtgtctggaggcgaaaattgttcaagttattttacaactttctggcgaagaaagaaacggatatttttgtgggtatcatgtagatggtcgcaatagcgacagacgattggataaattgtttcaagttgctcatttttcgggggcatcgggaagtcgttcaataacatatttgccgcgagcgacactcatgatgggtgctccaggaatcttgctattatggttgttagaatttggctggtacagcgaaaatgagatcgatgtgtaggttacataccgaatccgtctcttaagatcacgatcgtttgtggcgataatgtagacacgatgtttgatgacacgatcgaccagacagtcatcggcatatgttcccttgtggtcacacttgacgcgctcgaaccgagggtctttggctacacgcagtgcaagtcggtatttcgggccaagcttctccaactcggcaagtacgcaatctgtgacgataggaatacatttggcgtacaaacagtcaagcatggtaggaatgacctcaagtttgtgctgaatggtgtgggaaatgaaattggtatcgaccagcacggagtatgggggagcgagggccgtgttgaactggaagaacattgacgaaggagcttgggggctaagagcgaacttgtcagtacgattattgcgatagtactatatgatgcacttacgcctccttgacgaggtcatccttcttagcctcttgacctttctctgtcttgtcttgattttgcttcctataaccgactgttagcaagtcgcaagaagatcatgtttcgtgattatgacgaacaggcgattgtcgcgcatggtaatggctctcttggccagcgcatacttgcgagtctttttctgaactcccatgatgacgagatgtggatgataatagtgaggaagaggttttttttctcttttcttatcggggaaatctatctcgggttcgggatgactaatcgtgtcgatgggctctgggcatcccccacggacaatcttgtcttcaaaactcccgtgtactcagcaataacctcaaacattcattatgtcgggagcggattcggactttgatctgtcgaaggtaagtccctacctcggcgttcgcaagcaacatatatttccctaaactatgctgctagacagcgttgtccctgttgcattccattccctctaccaacgatccaaggtcggacagctaatccaatatataggcacttgcagaacttgcaaagtacgtgagaccacttatagcttacatcaataaattcatgagattgacatcatatatttaggggtgaaatgactgcctcggccctggaaaaccatctgagcgcaattgaaagccaagtcgatgaactcttggcatctttcgaaaagcaggcggctgctgcagtggaggctacgtctgtcgatgaaacagacccgagtcaaccggaaacagatcaggatcaaaaagtagagccatcgaatagtccagccaagtgaaacttgccatcgcctaacttctctgcaactccaacctctgtgataatcccatctatcaaactcgcgggagtaatgtcaaatgccgggttccagacattgatccctggcgcagcaattttcacggtctcaatcacaatctggtcggtggcctcagaacccgcacggggacctttaatgctggtcacttcagatgctgcacgttgctcaatgacaatgtctctccctgatttcgttgccatatcgattgttgtgagcggcgctgcaacgaggaacttaacgccatggtactttgccaagacagcgagaccatatgtgccaatcttgttggctgtgtcaccatttgctgctaccctatcagctcccaccacaattgcattcactctcactttggtatctgcgagcaaagcggctgccatggaatccgtgatgagtgtagccggaatttcgtcgtgaaccaactcgaatgctgtaaggcgagacccttggttgtagggcctggtctctgtgcaataagcgtgagttaggaggctcttctcggccagcgaacgaaccacacccaatgcggtgccatatccagaagtggcgagagagctagtgattcgggattagtgagaacatacgacggataacggataatgtagcgaatcggccttacccagtgttgcagtgggtcaatacagtaatcattgaattccctctggacgcacgaacggcgatccattctgcgccattgtgtccaattttcttgttatcctcgaggtcttttcccatcatatcctctgccgcctgaataaaggcggccccggcctcccgggccggannnnnnnnnnnnnnnnnnnnnnnnnnnnnnnnnnnnnnnnnnnnnnnnnnnnnnnnnnnnnnnnnnnnnnnnnnnnnnnnnnnnnnnnnnnnnnnnnnnnnnnnnnnnnnnnnnnnnnnnnnnnnnnnnnnnnnnnnnnnnnnnnnnnnnnnnnnnngttttctttccccgccaccccccccgccgcaaaaaaagggggggccgcgacttcgcggccagtagagcccggtgctttcgtgcggttgaccactacagcctccagcttgcgcgcagcatcagcgagattgacggcagtcggcctactcgtcaccagataagcaagcttctctgtgatatattggcacacctcttctggtgattgtgaaagcttgtcgctgtccacagcagaggttagctccgaagcgagagcaagcattgcgacgatcgcaatagcaggtgcccctcggactttcatatctttgatggcgtgccatccatcttctgtagtccggatgggaatgtattcttcgacaaatggaagctgcaattgatccaggatctcaaggttgcccttgctatacttgattgcctgtaacatcttcgtaggtgacggtcaaaggttttaaagaccttggtgaggcgcgaagaaagaaccttaaaaagtccgcgggggactttggaaagcttacttaagcaatgcggggggtaactaactacaacaggtacaatagttaagaggtacaaccttcccaggaacgaggaacgtacctctaacgtatgtagttaaggtaaccaagccaggtaggatcaaatgccatggattactgtgcgaatatactctgcaccgattaaacatgaggtcaatggcacatcgccacatcgccagaaaacttatcaagccgcctaggaaacaaataacgagctcatggtcaccagcgccaatgttgagctcaatacaaagcaggggaaaaaaacccccctaggtacgtagccttcataaccctaggctcgcaagtatggccaactgcatcataagaagagttggtcaatcaccacctaggcttatattctgtcctcctagctagaatgttccaaatcattgcgacgacactcaaatggtgtctttcttatccacttgcaggttgtcataggtgggcccaatcgataacatcgaatgtgtattgtgggatcagctggaagagatgtagagtactgtaggctctagtcagaaagctgtcgcactagccataggattggaagacaagaaaggattgacaaaccgttgtttccgcgcacgaaagcatccccgtagtttcgtcgtagttttccattcacgtattcttcagtcttttcaagggcaatgttcatgtagccatcaactgattgcagttcacctattggcgcattagaagcgaggccactaggaacaagagaaaagtccatacccttgtataccactccagaattcagcttcacgatcacaggcgcaccgatgatctcactcagaaagacagaagggtctttcccttcagaggttgcggcgttctccatattgatactgtggtctgaactttatcaaatgtcagccagagctaagttccatgggaaaagggaagacgtaccaggttgagatgtgttttgaagcagacggagggacgaagcattcgaaagcaagagaccagtaaggcggtgagtgatgcactatcacaagcggggcgggatctgctgatcagttttcgaagaagatcggacaccgccattgtattttgccggtattgccggtcataaaatagtatactttctattcgctttgcaaacatcatccaaaatattgaaatagttgaatttggcaaactatgtgctagcatagctatttgaggctaatctgtaactaataaatcaagaggaaagaggtcttatatagtcaaatattccgttaatcagaaagcatgctagtgtacctttattaggcggtaagcaggacggtgtcttgacccactataggctagaaagtgtgatagcatgttccctccatcttgactaccaattgtttggcttatgcccggccctcgtgtcgcacatcttactctatcactaacatatcgctgattataataaggtgcttcccgagtcacttctaaaatccattcggccatcctaccatacttggatcttttgagggactcatgagctttttcaaaaagccctcatgggcaataaagaatatggaggaaactggcactgaattttatcgacgctcagaacaaacgtactctgatatcattgctgcgaatcgtgaagcacgccacaagccgaaatcaccggagatcccagaacataccgaagatactcaagataccggggatattgaagactcaaaacgaaagaggcggcgtcggcactctagtgaaaggggaaaggggcgcaatgatagcagtccggtgcaaaatgtggcccgtgaggttgataaacttgtgctaccggagccacaagagctctcgggttcctcgcatgattcctcacccgaatcagtcaagccagtcaaacaaagcgaaccaacacagaaaagcagcccaggaaagcgcttgtcccagtcaccgcacaaagtcagtggtccggaaccactaggtgctctgcctgttcaaccagtgattgtcctagcggatgattcggaaactcgaacccctcgacctgttgaacctcctaggcctgttcaaccttcacctcggcctgttcaaccggcggaagttccagcggatgacccgattgtccaaatcatgatcacatccgaaattgcgaacaccaaaccattactcgtccatcgaaaaatgtcacagcggctcagggatgtgcggttggcatggtgcagtcgccaaaatttcgaaccccatatacaggcatcaatctacctgacctggaagggccgacgtctattcgacgtgacaacttgcaggagtctaaatataaataccaggaagaactctgcagcgatccctggcattgatgatgacgactttgcagaccagaaagagctgcgcatacatatggaagcggttaccgatttacctctcccggtcaatcagcaaattacctcgcctgataatgaaaagccccctacagcgtcacagtccccaggagctgaccagggcgagccaatgaaacttattttgaggagtcttgaacacgacgatttcagaatcaaagcaaggtcgaaaaccctgatctcgcgacttatatcggctttccgggagaaacagaatattcctgtggacaacgacatctttctcttgtttgatggggacaaactcgatcccaattcatgtcttggcgactacgacattgacgatctagatctgctggatgtccaaatcaaataaccctcctcgaaggatctgaacaactgaataatagctaatccgggctaatcaaagctaataaaatcttccagtctgactctagggaatttctgtaaagataatgtatatacggagcacaatttcagagtaaacatcaacttagtatagtagtggacctatccatatcgatcacatgatatcagataagccgtgggactctttttttttctccctcggaggggccatcgacgatgttcattatccgctaaattaatctcctgtctagacccaatcgatctttacatacctgagcaacattctcagaatattcgcatcgacaaaccaccaacaatcaccctccaaaacccccacaatgaaagtgatcaccgccaatttcgtgacatgcgccgtgaaggaatgcaagacatccccggcctcattcccattacatttccaagacgccgagctcgagcaacaagaactagacttccagcccgaattcatccgcaacgttctcccccgaattgactgggaagccctgcgcaccgtttccaacgaggtatgaagatccgacacccaagtttacctattcaaccgatatacctatacatacgtgtaggtaattcaccgacaattacaaataagctgactcttgcggtcttatttcagcttggattcccgagtcttccagattcgaaacctgagggcgaggctctcgacaacgagcagacattgaaggacttgcatcggttgcttcttgagacgcatgtcacggaagggaaattgacctgtgggaactgtggtcattcatatatgattaaggagggaattgcgaacttccttcttccaagccaccttggtgagaaatcttcttttcccttgggtatgttcgtttgctaatattcctccagtctgaacgacacaatcccacatgcgcttttcaccaaaatagcttcgcaaatcgataccccaggactaggaatggtcttccttcctttcctttcccttctctgaaagaccctatgcagtggcacgaaggttatcagatatccaaatcgggttcttctgggatttgacacatctacgctctcacatctcctaagactgtgctccagcgccatgacttgaaacggaaaacaggcgaaattcttttggaattggtatattgtacaagagagttcgtagtttatgaaatcacgattgccattgataaatgcgtcaatgctcccacactgaaaacgccagcccgattcaacgccgcccggtaaatgggagtcaatatacctcccaaagactttggtagatagatctcggaaagcgttttttaattaaggaatcccttgcagcccgttgaaccacagagacaggggatgcggtcatcgctgtcccactctctctcgaatttgtagtcgtacgttaactcctcatctaatagcttttgttagcatttgtcttttcctgcaaagcccgcgcgggtcacaaacctctttcaatatccctgagcgcataaatcacaatccgtttgctaccatctaccttaatgatcttggcggtgcagtttggtgtacagctgtgattgatgaatcgcgcaattcctcctctctttgtggcatcgatgacggtattctcgtcgattcggaaaagataactgctgccgatcccgctctttaggtatcgtctttctctcatgtcggcgacctgctgacgcactttctctccgacgtactcaatgatcatgtcattggcagtgatgttttcttcggcatacaagccccaattatgaatggcagagcgagcgaagcgcacaggcttcttgcgtttcttaagctgattgaatcgaagaacgtctccttcgccgttcgcggtgggaagggcctgcttttgtgcattgatgtctgcaatgagccggcggttgttgactcgggttgaccgggatgtcgattttgagattgttttggcggctgcaatcctggcagcctcagctgccgctgcctgggggtctgctttggcatttgcttcacgctcttctcgagccttctgaaccttgatccgatggggcaggtatttggatttttctgcctcgagaatcctttttcggccttccgtccgcgcagcgcctgtggtatttggcacataatagccagggatactgatagcgtcctgggtcgtaccagtttccaggccattgagagctttgatctccttttgtttccaaccccatgcagcaagattttggataattgattctgactgatccagtaggatttcccgcaaaaatcgcaggtcttcatcatccttgaccaggttttgccaaccatccaaatcaagcacgatgttttcatcatcttccaccgtggcgcggggctcatccttggaaactgcccattcgatctctgttctcggctcatcgataggttcggccttccccgtttcgctgatcgagaggtcatcatcctcgggatgtttgtaggggacattctcggtgaattggtctgcgggttgatcgtgcgttggtaatttgtcgtcatcctctgcgaggtcgtcatcaatagccgcgggcgtttctagctcctcagtcgcatcctcatatccgagtatttccgagtcaatgccaaacagctcttcctcctgtcgctgccgctttcgtgcttcttcctcttctgtcagtcgctttctcttgcctgacgtgggagacacctgaagttcgtgggaaagatcgctggtttcatttgtggcatccaggtcgtccgcaagttgagcgctgcgtgatgatcccagatcatccgactggtatcccccatcccgttcaaactccgatgacgttgaactttcgcgactagggggacggctctctcgctcatcggcatccctagtagcaggagtgcgctgctcgtcgtccgaatcttcatcatcgtgcagctgctgtaaacgatgatataagggccggacttctttctttcgaagcggttgcctacgccgttcgtctaggaaggcagcacccgcatggtcaagaccatgggctttacggatacgaggaagagcaaggacattcagacctgatgatctgaggggatctcgcccggcggacatttcgcctcgagagccaggggtgctgtcgatttggaaaacagatcgctttgtaccctcggggtctgaaatacccagcctttcccttttagccgcatgtttactcggttccaaatagtcgtaaagagccggagcagctatgcgtgacttcacatcctcgaggagcttgtccctcaagtcacgaatgatgatagacaatacttctcggcaaggatctaaatcaagcgcccgctgctttttttcttcttcaagatccaattcatcctctttctttgtccgatctttttcggccttgtttcgttgttcggtgcgaagtcgttcggggctgggactccgttcgtagtttggattcccgtagggctggctctccatattcatgatgtaggtgaacaagggttgcatgtgacattgtcggtagcagcgttcagtttcctcctcgccccggcgcgagttctcgaagatgatatagtagccggttttgtcacaacggatatgcttgtatccaaagagtctgagtctctttctcaggtgcggaaccgttgtgctgagaactgggacataacaatgcgcaatgaaaatgtatggatcgcgtttgatctgattcaagataggagtttcttcgaccaatgattgtatgacaggggatcgtgcagcggccctaggaccctctgggataacgagccccggccgtagggatgatctgcccgagggacctttgggcgcagtcggtggtggttcgcttttctttatctggacatccggtctcggttcgattgcgggaggaaggctaatcttggaagcctgtcgctgggactcgactgctttcgcggccattcgatttgagacaaccccgtcgcgatccagctccaccctaatcctgcgcgtgccaatgcgttgttcttttttgcattcgaaatatgcacgtcgggctgcgctagatgctgacgctgacccatttccccgagctgaggtgctatctttgtatttgatggagcagatccccagaaaccggccggtgatggggtctgtgcggtttttgatttcggccacatctccaaagctcgagaaaagtgcgctgatcggggcaatcggggtcaaagggtcgaatcccgtcaccacgacctgaatcggaggcccgggaccaatgctggttgccacatcgtatgaccatggtcgcagattgtaaggcgcgggtcggtattttgtcttctgcttgcagccggatccacgggtataattggcaatcgcacgacgaggatcgggtgcgggatcggcttggccattattcacgatgtccacatactcgagctttttccgcttttcctttgacgaggtccgcttgtccagatcggggtcgtagacaaccttgcagcctgtcacacggagctcgacgtgtcgagtttgcgactgaggggtaggaggggtgtctattggggtgatggaaggtttggtgacatcaggattcggcctggaagaagtgcccggagagcctccgcctggtatctttggctgtgatggactggttactttgcaaaggggcgatgactccgcattggtgagcggtgtcagcgtatcgattggtgggacgtgatttgccgtgggtggtggaggtagcccaatcctatcctctgcgcttttcgccttggcgaaaatggtcaatccaagctcgttgggaaccgatggagtgcgagctcccccctcgtctgtatcaattttgacgggcgtctcaacgggcgcgggggtgctcgaggcaagagacactagacgatccggagtcttttcggaaatttgatcaccctcgacatgtaatttccggcgttcctgcgctgttttgaagcgcttccgttgaaggacagatggtgcggtggggaagaagtctgcaaagccggccgaggcgcgtgacatagtgagaggttggctacacgccagagaccgtggcgcgatcagaaggcagcatccttgacagtcgtgatccggctattgcgaacacatgcgaccgagaaggtcccggcacggcagaattgaggaaattgagatgaaggggcttttacagaagtgccaatgtcaaagaagggatgagaaaacaaaagagatgacaagaaaaagggagaccgaaaagcgatatccaggagctgttgaatctgcggaggtgccgttacgcgcaactcaagagtttgcaggaggctaagacgcgatcgagcggaaggaagtggaatggtggggacgcgggagtttgaacttcacgctttcaagggatatgaactcctgtaaggaaagaaagaaaaggacgtgaaatagatcgaatatgattaggtatgatgtggtgaagttcaagttcaagttccccgggggccgtttagtgactgaatgattcagcaattcttttttttttggccttgaaaggatccccagtgacctcaccgcgacttaataactcactacaataacgcccacagttgaggtacctagtaagtatctttgggcactcattggggaaatcattgatctttcattatcttattgctattggagatgattgttaatagtagccttggtattgatctcgtcaataggttgtactaaaaacaagcccaaaattcatgtcttgaatggttccatagtctgataataggggattcttgcttgcaccctcacaaccccccctgcctgaaatttcagtaccgccttcctaatttggttgagcatctgcctcgacactttgcttctgcataccgctctcctcaccgcctcctcatatctacgccgcttttgtatcaaactgcataggatagtagcaagacagcaggtacgtatggtttgtatgtaaactcctaataaaattcagtcactcatacatgtaagccagaagtgggcagaatacgtagctgaaaaaataaattatggcagaaatatggcagaattctgagtggtacctgatcaggaaggcggtccagggatttcatgcgagcaacaattcccgatatatatacggagtacgtttgaacatgtatcggattcgaatatagagtagtatacataatacaacatatatccctgcgtatgtctcggactttgccgcttttattagggtcatcctacctcttcttccgcctacgaacagagaaagcggtgagaggtgaccctaaaattaagcatggctcccccacccaactttctcccttcaaccagtcacactcatccatcatcaacgaattgcacgcatccatcatcaactagtcgcgctcatccactgtcacagctgattcggacgccgtacttttactggaactgccacaccctccagactgggcccaagcgcactccaacctgaccccaagcgcacttcaacctaggtaattgacagaatgtcattatctatgacagtaagtccttctgtgccttctagtattttcgatactaataatcaagctaggagctgaatcgaaagttgaatggttacgtaccacttaagcctacggacagaaccaagtactttctccgtgacttttataagacccttcctcctgatggaaaagaaaatctggcgcaggatatttcagggtgtgaaaacgatgagacacttcggcaactcgtccaaagtattcggactggtttgctggttcccttgaaagcacagggtggtaaaacacccactgaaatcactccgtctccgcgttctggtattgaagattcaatcgaggatcttaagagccaaaacatcgaacctattagcagaagttatcagtcgcaactccggaaccactgtttagaaagagatggtaataaatgtcttgcaacggggatgtacagtcaggcccatgcctacccaccgaacgtacttacgacctcccttgaagcagctcatattattccatttgcatttggatcctttcaggccaataacagcgagtcagtggatcgaaatacgaagatctgggtcaacctaagacgctacttcccagctcttcgtaacatgtccttcaccccagaacagattaattcagaaaagaatatcctaatgctagacgccgaaattcataaggaattcggacaattcagaattatctttgaagcgaccggagttactcatcaatatcggatcaagaccttttcgggcatcagcacaaggacattgagagatttacctcaaagtcggcttgtctatttcacagttcataatggaagttgggaacttccagatcctcaaattctcgaaatgcatgcttgcattggaaaattcctacatatgagtggccaggcggaggtgatcgacaagatcctagaagattttgcagactgtggtgggcttgccccgagtggaagcaccaatatcgcagaccttcttgcagtgagctgcctcgcagtcctatgttgaagtcgttcaacttttcagtcacaatccacttgcttcattgtgtactcccaatgccggtctcccaccgattctccttgtctgcctcggtcttaccacgagagaagaattccgttaatattgatacttgttcatcctcaatttcgatgttatttttaatggcggacaccagagacgtgacatgctacatttgatgaagaaccatttgcccaaccgaggtggaaagcaaaacagttatttgtacttcctccttttacacatcaagtacacctaagatctccattatgaccagataaatcctatcctatcttccccaatcaattctatgtccgtgctttgacagccatccaacgggcctagtctctcttggaagcagaatctagagctcccagatctgcgtcctctactccgtatatagagaacaaacccacatctagacggcaaacggtcatccggggaaagcgttatctatacagtggtcgaaggaatatgaattcagatagggcttgcgttatatattatgacttcaggggaaatctaggcgctcggtccatgtggacagttccacgaaagatacagaagtggatggctgatggagtagaataaatgtccacttcgccgagagaaatggctttagtcgataggcgtatagaggcatatatcattgtttttcgtggaggggtattttgcagccgagagacatataactacatatggtttcatgtagaaggcatgttgtcagaagtacataaacagatcttcaatgcactgcaatgtggcgggagaggaaaacgaggtggagttcagggaagacgaggaagatgcttccatatccaatcatgtacctaggtcatcgaagtcggaagagatcttctggtgggcccatagtgccctcaagccgactgcaagactgagctgtacggagtagttagttagtctttatcatgagccaattcccgttttttcttggactggatattgaactcgtcaaattggaagggctttacaggcataagttataatcaaaaattattccaattttcaaagagagccaacttttttgcggttccaaggtcggatataccgccacattatgtaagacgccagccagcctccgttacaacacagttaactaaggatgttagtatgaactagcgtgtggtgagcactatgtcaaagttccaggctaatctcggacttagtgagtgagccctgtcatagaaatccatggaacgattggaaccaacgagaatattcgttgaggagagatgcttgaggagaataataccccataccgcgcttatggggacttccaaatccgggtgcccgagtatcaggtgattccctacgtccatggatcatcgtcagtgagcccggcgagttcaaggcttatgtaagaatcaggggtctcagcaaggggaaggggaagcgaaaaccggaatatgcacaacgatgtaattaaatatgtatggagtagatatgatgttatggcggggaatatagttatcattcaagcctcctagtactatttacatagttatagcactgcatcagccctgcctcttttttttttctcctcgcttgtatgaggctgatatctcagcttatccacatcaacctacggagtacttcgtataaagtagcgtagtgggtagtccctctcagccgccgttgtgtatgaaccgaagaaatatatctgaaccgggcaattaattgcgagggaccaatcgtacatgtgtatatgcagttggcgagaccgagccaaggggtatttttgcataaaaacaattaaaatcggtaaaacagcaactgcaaaggcgtggaacgtctgtcgaacctttccaaggttctttttttctcaggggatcctcccactaaggaatgcgccgggccactaaaagatataattagagattttcccccgtatgttttttttttgggactttcaaagctccgccactgctttgcttcgcctgctagctccgatctagcgtgaatatacggcgaagatcagaccgatataggaccccggcactaccaatatagaccccgggactcagattgccaagaaaaggagaaaaaaaaaaggtactatttatttacttgctattattaacaccaacgtcaatggaaatatttaatatttatttttaacaatgttcacgaaataaacatcaaataatatgccaagtgagacattcgattcccctaacaaccagcattggcccgagcattctcctcattggacgaaagcttgcacaaagtgaaagagctaataataatccgcccctccccctaccctctctgttcttgcccccctctacaacttataaatacgaaactcctgtgccttctttgcatctttctatcttgtctcctctctctgctgcttttaattccccctgacaatctttattctctcactaccattgtctttgcattcactttttgcttttgcccatcatgtggtaagctctggtctaccatccatggttgaagtatccatgctcacagttcttagtggaatcttcggctacatcaactacctcgtggagaaggaccgcaggttcatcattgacacactgcttaatggtgagtcgccaagtgtgattcaatgattttagccttttgctcaccgttatttccccaggcctctccaggttggaataccgtggctacgactcggctggtttggccgtcgatggcaacaagaaaaatgaagtctgcgcattcaaggaagtcggcaaggtggccaagttgaaggaactcatcgatcagagcacatatgacatgaccaagaccttcgagtctcatgctggtatctctcacacccgttgggctactcacggtaccccttcccgccagaactgccacccccaccggtaagtcccagaaaacaccccccccggatgatggagagaagatagagaagctaattggatggtcgaacagttctgatcccacctgggagttctccgtcgtgcacaacggtatcatcaccaactataaggaattgaaggctctgctagagagcaagggtttccgcttcgagaccgagaccgataccgagtgcattgccaagctcgccaagtacctttacgaccaacaccccgacatcgaattcacagtcctcgccaaggccgtcatcaaagagcttgagggtgccttcggtttgctgctcaagtcggtccactacccccatgaggttattgcggcccgtaagggttcgcccctagtcatcggtgtcaagacctccaagaagatgaaggtggattttgtcgatgttgaatactcggaagaaggtgtcctttccgcggagcaggcctcccagaatgcggccgccaagaagtctgccacaagcctccttgccccccccgacaagtcactgttgcaccgctcccagtcgcgggcattcctgtccgatgatggcatcccccagcccgtggagttcttcttgtcttctgacccatctgccattgtggagcacaccaagaaggtgctctacctggaggatgacgatatcgctcacatccacgagggacaactcaacatccaccgtctgaccaaggatgatggcacctccaacgtccgtgccatccagaccattgagctcgaattgcaggagatcatgaagggcaagttcgatcacttcatgcagaaggagatcttcgagcagcccgagtctgtcgtcaacactatgagaggtcgtctggatgtagccaacaagaaggtcaccctcggtggtctccgccagtacatctcgaccattcgtcgctgccggcgaatcatcttcattgcctgcggaacgagctaccactcatgcatggctgtgcgtggtatcttcgaagagctcactgagattccgatcgcagtcgagctcgcctccgacttcctcgaccgacaggccccagtcttccgtgatgacacctgtgtgtttgtctctcaatctggagagaccgctgattccctgatggctcttcgctactgtctggaacgtggcgctctgaccgtcggttgtgtcaacgttgtcggatcttccatctctctcctcacccactgcggtgtgcacattaatgctggtcccgagatcggtgtggcctcgaccaaggcatacacttctcagtttgttgccatggtcatgttcgctttgtcgctgagtgaggatcgtgcctctaagcaggaccgacgtgaggagatcatggagggtcttggacagatctccgagcagttcaaggagatcttgaaactcaacgaccccatcaaggagctgtgtgccaagttcttcaagaaccagaaaagtttgctgctgttgggccgtggtgctcaattccccactgctcttgagggtgctttgaagatcaaggaaatctcatacctccactgcgaggccgtcatgtccggcgaactgaagcacggtgttttggctcttgttgacgagaaccttcccattatcatgatcctcacccgtgacagactcttcactaagtccttgaacgcctaccagcaggtcattgctcgtggtggtcgcccaattgtcatctgcaacgaagacgaccccgagttctccgatgccctgaccgagaagatcaacgtccccaagactgtggattgtcttcagggtctgctcaatgtgatcccattgcagctgatatcttactggcttgccgttggcgagggattgaatgtcgatttccctcgtaacctggctaagtcggtcactgtcgagtaaatgtttctttagggcaaggttagacgattcttatgatccggtcatctttttatttttaggtgttttcagcttcgggacaatggaatctcgttttgttttttcaatcatctttctttgaatccaatgcctattagtattttttagttaagaatcagtgtccagctttataaaccgaattgaccgtagaagcattccacaggccaattgcgctcaattgccgtgggtgatgacattccgccttcccccgccaaatgcgggaccgagggatttcgcccctcgagcctcgagctctgattcctaaacacttgtgtcaagctcaattcttccaatcttcaggaaacaacatcatctttctcggacgcccctctcaacaaaaatgactaccatcaaaggccccggcgcagcccagacccacgatggtaaaaccgaacaacagcccttggagaaacacccccagctaataccgattccaccacaggctccggactccgcgtggcgatcgtgcacgccagatggaacacagtgatcattgaccagctggtatcgggagcgaagaagaacttgctcgctgccggcgtgctgccggagaacatcacagtccagacagttcctggtagctacgagctgccgcttgcggtgcaacggtgagtgcggggatgatatctcacacatgacattgtatactgtatacgactgcatactttatagtatactgtatactatgcgctgtagtgctgtgtgctgtgtgcttgctgtatctgcccgtgatagcgttgactaacactacttgacatccagcctctacgccgcatcccagctccaggccaactcctcctccacgcagggcaccagcgccacggacctcctgtcctcgccaacagccgaagtatccggctcgaccaacttcgccagcccgaagaaacccttcgatgcgatcatcgccatcggcgtgctcatcaagggcgcaaccatgcacttcgaatacatcgccgacgccgtcagccagggactcatgcgtgtgcagcttgattcgggtgtccctgttatctttggcttgcttactgttttgacggagcagcagggattggagcgtgctgggcttgggaatggtcatatgcataaccatggtgaggactggggaagtgcggctgtggaattgggtcttaagcgcaaggagtgggctgagggtaagattttgtagaggtactttggaagagaggctgggggctacgatgggaccctctgatatatttggtgtggctttttggaacctgaataacataacttggtccgttgtgggagattgtttttggagtaagaaagggaacatctttcacagaaccataattcttggggagcataatctattacatgttcactcttccatctgttcgccttgacccttgtcctcctcttcttcgtcatccccttccaaagaccgctttgctgctttctctgcttcctcgaggagctccttgggcacttcctcgtggcggcccttggtcggtccgtcgaccgagctgatccacgtcatctcgagctcgaagtccttgtccttgctgtcctcgtgggagacatagataatgcgggcagcttccttcacgccatctagcaaagacagattgcccgaggtcaggtctagtttctcgagttcggctttggcggcctgtcgtccctttccagtagcagcaccgtagtagccctataaatacttgtcagcatattcaaacacccacacagcaaacaagtcgcaacgtacccaatacagtccactaggctcgatcatgtataggccagggcctccagccttggcaccctcgatctttccaccggagccagacttgggtccattgccgacctgtccatcaactggaagctccgcctcggtatcccagccaccaacaatagcagttacaccgaagggccgtacactggagtaaagagtgtaggcctgaacatacccacccaagcgattggccagcgcagcggtcggaatgggacctttgtatgtgcctctccaggaggaagcttcatctctagctctggaaacaaagtgacggccgtcggggacgagtccagcggatacctgtggtagaaagaagacagattagcaacggatacttgaagccttccctggtagcatgcttttgataaaaacgtatttcgtcggggagaggcgacagggagaaagggaagtaggtctcacaattccgacatggcgatcgactgttgcgattctcttgttcgcgcctggctttaggagcttgctagtgatgatcttctccactgccaacactacaccatcattgcatctgatgccgatagcggtacctccgttctcaactgccttgacggcatattcaacctagatggtatggtcagccgaagctgttccgtggctcattcatgagctgggttgtgtttggttacctggaaattccggccgtctggcgagaacaccgagttggagagatcgtagcctgtgccgattgacgtctaaataatcactctgttagcttgatcgggatacagcatagtacattgtgtggatccgaagctgactgaccatgattttggtgaggatgcgatgcggtgaggttcaaggacaatagacgtcaccgtgggtaggccgggggatcgaaagaggtaatctgtattggacagataagggaggagaatggccggtttggagggagactatggataggtagggtgaggttggaagctctggggatgataacggaggttcctaggctaagcagtgacgctgtcgcgtcacggggttgcctggcagagcttccagtcacatgaccatggggtacctaattggtactttgatttgtatgtcttctctacaagcttttggagtactacttcagtaccttgtagtattggatgtattggatgtatcatggacacagcgcgaacacactgtgggcatatatggacccattatggatcgattacaggcataaaatgcagtataacatttgagcatctcctactggccctcggactgcagcccaaccgagcaagcacttgggcatctttgcccctcgatctaaacaaaagacacaaactctctgaatcctttctcgtattcagttttagagggaaaaacttctgaatcgattctgccattttcccattttcccattcattcggatatcgtcgagctatacagaaatctacccctccatgtcctcctcgatactacatcagtgcccgcactgcgggcacgtctccgatatctcaaatgcgctcacagccttcatcgagaaccctcactgtaaacaggtagatggtgctcgctcttacatgttatgccaaggaacctgacccaggggcatatatatatctagtgcggcatgtctgcttccgaaggcgagtcgaaagtgcaagacgaactttcagctctgttcgatagacaaatgagtatgacacagctgcagcccgcccctagagaaactgtcgtaccacctcaagcgccacaaattgcatacagcattacccaacactaccaccactcggcccacagagtcgcccagcacacaaaccagccccagcacacaaaccagccttcaagcgttgatgttctgagacatcacggtcttgatccaaatgcccttaccccggaccagcttatgctcttcgagaacgccgaagcggaacagagagaacgattgattcaaacatggcggctctactcgcagtttgggaatgaagccgccactgccggggactttgctatgcatgattctgctatggaccacagtgaagatgggaatgcctatgctgatgctgaaccctacatggtgtcgggctacgggaacgttgccaatcaagcctctcatatcccgaaagagcctaccactggtgaatcatatgctggctcaaaggacccggtgtatcaaggtcagcaatggtgggagttgacaaaagccggtccgatggagtcgaactatggcgcatttgaagagatgagacgatattaccccagctgtggtgtataccaccattagttctgttaaaatagatctattggaacgaatttcttttgtaagtatcatattattgttatccttgcctctacatgccctaactagcataaacacttaccaattagctatccaattactccctcggtcgaagggatatataccaaatttaggtcacccgagttaaccggtactttttgtcttttggaattctgatttggaatgttatttgagaggagatggaattatttggttctagatacatatttatttgcgtagtgatccatcaaccctcacaattcaagtgctgatttaatcagaaaccaatgccacctgggcatgaccaacggtgaatataaaggagtgttcgccattggcatttcataaaccaatccatcttaactatgccaattggcttccaaaagctctcataccgaaaagtaatcgacggtgttgtgcatatcgataattgaaaagagagctatcgagcaatctctatcgatgttgcagcaccacggaattcattgtataggagacactgggaaaagtcagtaattgaatccatgcacaggacagatggaactgtatcatacctttactcctcttcctcttcctcgagggcagccatggcataagcgagagcgtcggcggtacgcttgacctcatcgacggcatcggcggcacgcttggccttgtagcagccctggccaatgtggccacaccacttctgaagaacaaggggcagattcttggccatggcctcggcgagagcatcggcagagcgcttgacatcgacggaggcatcggtggtccgcttgcagccctggccgatgtggccacaccacttggggagagttgtttgaggagtagcggcagcctggacggtgccagcggcgagaaccgcgatgacgacggaggtgaacttcatcttgatggttgaaggagaaacgggggtttgaaattgaaagttggtttgaggagcgaaagacagatactgagatagctcgatgatggagatgtctggagaaaagaaagcagaacgaggaacagccaggtttatatattcttaaagatcaggatcatcgttggctcaatagtagtctcgttattgagaagagcatgttgggccggagttcggagattcctttactctgaatagagacacggccctgaatagagctctttgtcaaggaacattaacccaaatagaggcactgctcgagatcggcactgtttgatccaccgtgaatagggttcttattgacaacccttagcttgcctcctcaataaggaactctgtctcgtatagagggtccggggcaagccataatttggaatgctttgacaaacagatgggctgataagcccagtggattgaactagagtatattagttaagatggtagatatgttcttttgttcgagttgaccacttgacctgaggtatgtgatattcgaggaccagaagaggatctgaataagaattgaccaaagaaagttagttccggggaataagtgaataagaatgccaagctcatatgagatttcattgtttcattgtagctgtagtatgtctagtgtcgtgtaggtagtgtaggtagtgtaggagtggacatactgcccagcccaagtgatccattcagataagatcgggccggcgctaaccacaagtcgctcgatgccgagcccatccggagccttttctcccgttttcacgcttcccttttccaaccccctctcacttcgattcatacctcacccaatctctttgtttaaatatccaatcactcgaaaatgttctccagaaccgcacagcctgcacgggtaagttcctccctggttttgctttttctcggtttccgcgtttccgcgtttccgtgatctcagtcctttgcaagggagttagtggcagcttcgctaacctgtctctgctctctatagactctgctcagcagtgcttccgcagcttcatctgtcggccgctctgttcccgccagatgtacgcccattaaaattccctgacgtgcatcaaaatccatccccgctaacccatttacccagccttcgctagtgttcagtcggatatcttcaagcccaccaagtacggtggcaagtacaccgtgaccctcatccctggtatgcttcacatgttttgcgccttctccgctgtcatggcgcacgctcttgaactaacactcgacaaggtgacggtatcggtgctgaggttgccgaatcagtcaaaaccatcttcaaggctgacaacgttcccattgagtgggagcaggtcgacgttagcggtgtcgatgccggtaacaagcactccgaggagctcttccgcgagtccctggcttccctcaagcgcaacaagctcggcctaaagggtattctccacactcccattgagcgctcgggccaccagtccttcaacgttgccctgcgtcaggagttggacatctacgcctccatctctctgatcaagaacatccccggttacgagacccgccacaagaacgtcgacctctgcatcatccgtgagaacaccgagggtgagtactccggcctcgagcaccagtccgtcaacggagttgtcgagtccttgaagatcatcactcgcgccaagtctgagcgtatcgccaagttcgccttcagcttcgcccttgccaacaaccgcaagaaggttacctgcatccacaaggccaacatcatgaagttggccgatggtctcttccgcagcacattccacaaggtcgccgaggactaccccaccctggaggtgaacgacatgattgtggacaacgcttccatgcaggctgtgtcccgtccccagcagttcgacgttttggtcatgcccaacctttacggtggcattctgtccaacgttggcgctgccctcgttggtggacccggtgttgtccccggttgcagcatgggtcgtgacgttgctgtcttcgagcccggctgccgtcacgtcggccttgacatcaagggcaaggaccaggccaaccccagtgccatgatcctgtccggctccatgctcctgcgccacctcggtctcgatgaccacgccaaccgcatttccaaggctgtctacgatgttatcggtgaagggtgagtgaacgccaataccgttatgaaaaatgacaatgctgacttccttcttttagcaacgttatgacccgcgacatgggtggtcgtgctaccactcacgagttcacccgggctgttttggacaagatggaggcggctctgtaaattttggaacccccctcactccaatatacctaccgctacgattgaggatgttgcttgctgattcttgcattgtgctctgcacaccgtgaattggtcggtgtcgtcttcacttgatgtattatctttcctttcaatttagctcgacacgttccctcgcaagttatagcaatagactatttttcttttgttcataacgaggacattcattgcattattaattgggtataaacatcgtgaatcttcttcaataggccagtctcatatcgtgcccagaaggtagagagctcatcctccaagcctccaacccattgcgaggcctctagcaggcacctcacgatcgactaatttaacccgagtcgaacttgtaggtaccctatgggcttcccggcaagacaatccgaataacgcccaaaggaatgcgcatacacagacagaatgggtgaaagctatatacttcgggagaatgacttgaagactcctttcatccgggctttttctccttttctcctttttttcgtttctctttttgattggatccgacaaagacgaacatcggtgcccgtaaacaaagcagtccgatcagaaagcgattcgtcgtttgcggccggtgtatttcgagctagccttgacgaccttgcccttcttcgccatctgctcctttttgttcataatccaagccttgtctcccttcctcggaggtccacgggcattattgatctccgtagccttccgccgagcatccaagatattgacatcatccatgccattcacaacacccgtaatatcaccgggcagaccgccgccaccaacagtcagaaccagatacaacttgctgctcttagttccggggtcatcttcaaggatacccgcaccaaagccagctttgattgcagccccactgatcatactccgctggacatcattcttcgggtagaactgacacaccgcacgtccaccccgacgaagactagcgtacagaccttcgaagaagcgtcgcagccgaccttcagcagtgacatcgctggtttccgcattgcacagccactggatcgcactgatgctgattgcggcgtcgaatgtgcccggccggaagggaactccctgaccgatatccgcgaggaatagatcgccttctacttcgcgttgtaaagccacgtccaacatgctgggtgagatatccatgccgacccatgtgtgcgggccgccgtcttcgggttcgacttcggagagcatttcgccggagagtccggagccgcagccgagatcgaggatgaaggatggcgattttaggtcgaggagttccagtgcgcgactggtcatgctggcctggatgttgcgaattcgcgacgactttgtatactttcgagattcattgtcattgtagaacaggtccggagggctgtagttttcgagatgcgatgttagttttttttccttcttcatgatatatgcagcagagtcatgcggtcatacagggtatcctcagggcgcgacatggtgtgtggtattgaatgtgcaagttgcgttgcgagttgaagttcagaaattcattaaattatttttggtggcgctgcctgaggcatccgtaccccaaaaccgtccacgtttctccgattgcatctcgaatctctctctctggggctgattgcctcccgccttacttttcaacactatcagcgctcgacagctttgtatacactgcgcgtcatgtggattttaccgctagtcggatatttcggtgtggttgtcgggtttgcgtttctcaccttggctataggtatgggacatggagtcctgacatgaatgggcaaaagctgacttggaaactccagcttcgggactctactatctatccgagctcgtggaagaacacacggttatcgcccgccgtctgttaacccgtttgatctacggcatcgtcgcgatacaagttctgcttatgataattgaccgtttccccgtgtcactatctctgctcagcattggttcccatatggtctacgccagcaatctgcgccgattccccatcgtgaagctatccgatcctcttttcctcctatcctgtcttctagtcggtctcaaccactggctatggttccgccacttctcgaagcctttgcctccgtcgaacaactggcgtcaaccatatggagtcaattacgatgagatgccctctttctctgaagtagcctcatactttgggctgtgcatttggcttgttccattcgccctgtttgttagtttgagcgcgggggaaaacgtgttgccaagcatgggctccgaatacgtcaccggggaacatgccaaacccgctggactcggtccctctggtggcaagtccaagaacaagggaatggccaaggccttggtggatggtgtccgcgattggacaagggagaccggtgaagtcatgggtctctggagaggagaaagtacaagacgattctgagtgagcgaggccacgggaattgataatatatatatatgtaatgaaatttgtattccgccatcgcgtcgtgtaaattgtaataacaaattggcaaagtgcgccagcctccatatcgcgtaactctggaccaccaaatttccagataaataaaagcagataatgatatatggacatcgagccctaatggtagcgctgaaatatgggggaaagaaataaaaggcgaataataaggggaaatatgaagaaaaagatgaagtagataaagaagcagaacaaaaagaaggggtataacggtgaaagttgctggccatggcatgggaactcccagctccaagatggacagccgcatcttgattaccattatcattaaaacattccctcgcgactttgatgtctgagattgccaagtggattaagtcatcattgtgcagtcgtgcaagtcgtaatttttccgaataagagaggcatgaccactggacattccagaatcggaagggcgtggggaaaaaaaaagaaagaaaaggccagtgagaagcgaatgataattcacttgccctggtagaaagaaggatcttcatagacagtacagattagtaaagtccgtgggaatattctcgtgcttgggtcttaccctccataaagagcattgaactctcccgtcgcttggtctttgccgagcgagtgtcttccgagctagcccccaacatgccattcaaggaagaatacgaagcgccggcactctgatgttgatggtggtggtactgctcatgtctggaagacgtcggttggtcatagctaggttgcattggagtgaaaccagtgtcgtggtgtgtcctgggaccatcggaaggaccgttgccatcaccaatgggtcggaacgaagtctgctggtacgaaggtgtagggaggtctgagaacatttgatgacgtggggaacgaatatcatcgggcgacagagtgttttcaactgtcaattccatagccggcctcgcaaagctcgaatcagtatcgccaaagatactgtcgtagtccgtgaggaacatcgagaagaccggcgccggaatattgagagttggggcaaagacaatgcccacgttcctgaccgtcatcttgttcacatcggaattgttcacaatctcgatcaagaattgcgatagagctcgtagcaatgcgagattgggtctaggcagcctatgcactagagagttgaaggcagcgaccttcttttggcggtcgtcaagttcttttcaatcaggttagtaaaaaaaaaaaagagaacaccaaatgtgtacataccgagaacgcgaaggaagtccaaatgaagctcccgggttaagactgtcgtcggaagctctcgaagatattgcttgaagagagaagccacggcatgaatgtcgtaatactgatctccagacacgaaatcaacatcaccttcagtgttgaaacgttcttttaacgctttaatcaccacattggaaccgctcagacggaagataccttcctccaaggcagcttccttggcatggagatattcaatgcagcgataaaccactgccggcagctccgcatcaatgcctggcagtccacaatcttgcacggcctctgccaagggtataccaaatacaggtctaataggacccgtcctctcagcattgtggcctgatgtatcgccgctggcgtggttggcaaggtcgaaagaagacctggaccggaaaccccagatactacgtttcttctctttcgtcgatgtctttgctttgttgccccaagcctccaggtcttgaatgaccgtgccgtttgtgggcctagatatcaatctgggagactgcattgtttggtcgggagacatcgtcgtgtccttgaattctgtcgacaacgtcgtcgggattcgtggagaccggggagcttgctcaacactggaaccaatagtcggaggatcagctggcactgcatcctcaaagctgaaaccctgcacagagcctcctagatcctggtcgggactatcaactcgaccagatttcttgcttccgttgaatattttagacttggtctcggatccggaaagtagttgcttttgctgcacgtgggattcatcttgagactgaggctgactcttggaagacacgctgccacgtgcctcattttcggaagaagcattctcaacatattccatgagagcatcaacccacgtatcacgctcctcgtcgctctcggcgcagagaacatgccgaacaagtgccgaagaatccttcttctttggttccaacaccagaaaggcatggcgatactggttatcagaatcatcctcggccccaggagatggaacattctcgttggatttcggcgattgcttgccgatctgggcatgatgaagtttaatggtacccatgtgcggaccaccgggagattcgtagtatctcagatcaggtccatcgagaacgaaatatctcgctttccagccaccgaagttcttgcctcgtttggtcaagtaaccttccttttggggctttccgtctggtccacgtggcatgtcgggccttgtctgggcgagacctttcagcaaacttgtctcgtcgtctcggggttctatggcatcacttgtcaaaaattggcagatagctagcgcggcattctcgtccagtggcgtgtccaacagtctgtcaaagtacgcattcagtgcggcacgtctcaggtcaaccttagcaggggagtgtccgctgaaaatgctcctatccggtaattttccggggaacggagaagattgtcggactttttgatccagctgtggtaaagcaccgatgaccttttcaactcgccatagctctgacatttctgaccgcaggatcacactgagagtaaaaacaggctcctcgtccaggggcctcgacgccatgtaactattccgggaaggtcgaagccgcgacgaagataccctgacttgaaccagaggaagggcattcggaggtaaaagcaggccctgatattcgtcagacatcaaacctcggtagatttgattgtcggggaaatttgcagatctcgggctgtcaatcatgattgtgggatcaattaatggaatagggccacgtccggaagggatgggagcaaagcccatgggatgattagccattcttggcgagagcggcaatccctgggcctgatacccggctgccatggaagtggaaaagtctcgtggcatgcgcggcatgggagaattaacgggtcgatcttctggtctcgggctcaagggcagtccagggctcaagggcatggcagcgatagagcgcccattgacggacgaagaaggagggggccgagagcccagaagtgaccccagtgagttagaatcacccacatttggcggtgatctcgtagaatgctccctggggactgttctcgggctacatgttgctgtatcccgggagctctgagaggatgctgtctgaggcggttccacagagccggtagacccagacatatccttctccagcgcagcttcgcggtcctgatcatcctgctctctcgtctttctccgcccacgacccgcactcggaaggccatttacatcctgggaatcgccgtaatcggaaccggaatcggaatcggaagctgaagatgccctgtcattgtctgcttgtcgtagattcagaggcgcaggcggtggtttgcgatttgggtacggaatcctgttatttccgtctcctacctgagacgggatatcggcggcatagactgggcttctggtgttttcgaagccctcccgccgagaggattcaaaagctgggacaatcgatggttggtcaggtttgcgagacacattctctttgtcactgctcggtgcagtcacagaggccgagggctcggcaacgggcaatggcggagcgtcttgtatatctttgagcttcttccgatatttctccttctcttgaaaagcacgctctagatccttgttaaggccgaggattaaagtcctttgtttgtccactaatttccaaagttgcgcgttctgagaggccgcttggtgtttctctttcaagaggtgcacgatcacagcctcggcagatccagcggcattgatgagattgtttatgtcggctgaactcagagcattgacatcaaaggtcgatctctgagagctggaggacagggacgagatagcagaatcgatcgacgaggtgcgaggcatgatgcgattgggtgtgcgatcacccggcatcgagtgtacagagctgacggaggaagagccagatcgatcgggctctggcgcacgggttgatttcggcgtattggtttcgccaggtcgaccgctggcattccccgaatccatttctggcgattgcgacgggctttgaccagtactggagggtggcgcagggtatggtgcattggctacgcgagtgattggcgaccaattctgggcggaagaagggttggatttcggagataggggactatcggatgatgtagatccgccgacacggtgcgactggggtagggaacttgtatgcaacggggaaggtgtgatatttcgggaaccaggagcaggaccggggcgttgatcggatcgagctaaataatctcgcggaatgaggccgttattgactgggaaaccggaccgattattagatgaagttggcgggctttcattattctcccgcgggatttgcgacatggctgtcagagtcgagactcatcagaggggtcacgttcggggggcgacacgaggcgaaggcccaaagggcgaaagcgcggaaccccggaagctgaagcttaagcgccagggagcaaaacagggggtattgttaaccgatcaactgattggaaagaaagcaacgatatgaacactccctttgtggcacagagaatgagagttgaaagggtgagagagcttaagtgcagtgtgggggggggagaaaagggggtatcaagccaataagaataataacaaaaaattagataaatactaaggagacgatcatgagagaatcgcagtccttctgaagaggaaaagagaagaagaagcgaggaagatgatctgagatgtctttggtatgcagaatccctttctgtcggggttacctaaggtagtaagaataactatcacgagtaactatataactactccgaggctgtttttctttccagtcactttgaatcattcttttcttttatatattacagtgtatcgtttataatggccttttacaaacaccatagaatgagaaaataatagttatatgaactgttgtagtacgaagccgtcctagcactcggagcaactgcggtggaaccgagtgacatgaaagtgaccgaaagctattggaagttggtgatggaaatattttgaatgtccagggcaatgcctggacatcgtctcacagtggactagtttgagttcggtttcagacttggcttgagatggtttctatctagaaaaatgacctagactcctgtaaatgcgaccgcaatgactatatagtacagaccaaatcaaaaagaaagagaaaaacgccggtcgaaggtggtacagaatgatacaattaggcgatgttgccagccatgcccatgaaaatagcctgggcggccagctgaagggaccagaacccgactttcttgaaacgccttttccgggcttgatcatccacgacatctcgcgcaaatgcgtcgtaggtctgcagaatttatcagtaatgatcgggggaggaaaagagaaagggtactcactgcagctgacaggtcatccatcaggccactgtcaaagacggtccagctaccatcaaaatctccaacgcgcttgactaagcggcaattgatgggaataaaagtgcgtttggagttgatataggcaacaataggacgaatcagtgcattgttgatgtaagacaggtcacgggtgaagatgggtacgacagcccgaacgttgttgaggtgcacgcgcatatccatggcgatgaaacgtcgatcctcagtctcggaatttgtactggaagacgaagatagaggttccggataacgattggtggtgactgtggtttccagccgatcatagaaatcaaccatcaccttggccaagctctcatcattttctgcaggtaacatgatatcggccacaatatctactgtcccttcgtgaatccaagagaaaggaccctgaacaccgcgattgaggtggtcgacattgaggccatcaactcgaatccgattatgtttcttccacgggcttggcttgccgtcttcttcttcttcgctatcctgccggagacccgtgaacccatgggtttgacgagcgtggattgtgaacaaggaattgtcataggacccagacatcatgttggcagagaggaaatcgtagaagagccattgcttccgcaattgagggaggtcgcacgagaagatgctcacggagaagggccggaagttgtccggttggtaaatggtgacaagcagatcatgcatcttgaaagagtcaatctcaaagtcaccaggaaggtgctcatgtcggtaggatttaggatccaagtcctcctccggccagtaaacgtggcggcggtcaacaacacctcgtatacctttcacctcaacatcatgaagtgggccctttccattgagccatttggtaaatgatagggtcacgttgaccgtctcaatcgacagatcaaattgtgtgtagttggtatcttcctcttcatcagatactacctggaaatcttctaatccagtatcacctcgagctgcggctgcagctgccgcagacttcggagatcccttactgacatggcctgtgccttggcctggtcgcttcgacacaaagacattcttgaaggtgatgacgccatttttccacttgggcacgattgcagattcaaagacaactttgactccagaagacttggtaagatagttacccacccaccctgccaatgtttctattcaagcacattagtatccagaccttattgcggcataaagtggatggatgtaccttgagcaaagaccgtgttgatcgcaaggatcaggagcgagaagaaagtggtagtccccacgacaacccagacgatgtgacccagcaaaacccacgagaataaggcagttatctcatccatattgtaaggacgaacacttcttatagaaaaccatttgaatcgtactttgagacgtgaccagaacccagttgctgcagctaaaagctcctccttggttggccgatgtagctgaggcatatgtggtaagcgatccattaagtggcgattggtcgttgttggttgctgagtatctttgggtgggctgacttgtgaatgtgcggtggatgtatctttgccggattggccgggtttttggggatggtcattttcgttgcgttcatgagtgtcttgtgaagctgctttcccgcgtagacggtcattcgaggtgtgtaaagttcgcttccaaacatgctgggcggcgattttcggagaggagatgatgcatgctgcggtattgtccgcagcagttgaggtaggtgaaacgccgaggaccaagaagccaccggaagcgaatcttttgaaccgcgtgggtttcgttgggagcgtcgagatgcgtcgtgtgtggcttgaaagggacgaatcgaggaatgatcttgaggcgtaagcatcggaggccgatacgcgatttattcgtatgcgaccaagaaatggatttgctgtatcccagatatgggcatagagccggcgtcccagattggcagacatgtttgtctttacatactggacatgaatgagaaacttgacacgaaaatatgacaggcacactgtatcatgaacagcagttgacttgttgacaagaagcttgaaagcttgcaagagttgcgaggagcccgaatgaaatcatcggagtttgtcttgtttgcagcaaaaaattcccttccgcccacacttcatttttccgtgaggggggaactgattaaattttacgataacagattttatgagggaaaaaacttgattccttaagcaacacaatgtcggcacctacagctattcgccagccagagcaggccctagagtttcagccagagactgtctctcatggtgagtactcgatccgatctgcaaatattattttcaaggctgacaatcaatagatcaggatgatgaagttctgatcgatgtacaagccatggacgagggcgctccgattaaccccgtcgccgagtccgtggaggacaccgaaatgcgcatcgatgaggaaggtcgccctgtcttcaccccggctaaggacgtcgccgccgcatatcggatcgagacacgaaaggtgcctgtcccaccgcaccgtatgaccccactcaaagcgagctgggccaagatctgccctcctatcgtcgagcacctcaagttgcaagtgcgaatgaacatcaagacccgatcagtggaattgagaacctccaagtttaccaccgatgtgggagctctgcaaaaaggtgctgatttcgtcaaggccttcactcttggcttcgatctcgacgatgcgattgcccttctccgacttgatgatctgtacatccagactttcgagatcaaggatgtgaagactttgaacggagaacatctcggtcgtgccatcggacgtattgcaggcaaggacggaaagaccaagtttgcaatcgaaaatgccagccggacacgagtggtacttgcagaccagaagattcacattctcggtggattcaagaacattcacattgcccgagaggcaattgtcagcttgattctgggtagccctccggtaagacttgatcatataaatcttcaaaggaattcttctaacacaaaatagggcaaggtttatggcaaccttcggaccgtcgcctcgcgaatgaaggaacgcttctgattccacgactcatttatctcatctggcatggtgtgggcgttcaaggtgcatcaggtttaagctgtcttctttttctgatcttagaggcttgacgacgtttaacgtaaatatatcaatcaattcatggaaatttcattcatctcaattatgtttatgatcattgatcaaaaatgagccccacgcccaataagaaggccacgatctaccatgtcctacactctaatcctgcttcagggcgtggaacacctcctcgattccttcccgggtaacaatcacaatttgcaaaccatcgccaacctcgatatgtctctccacagcacttgtaaaggcatcctgtacaagcttcttggccgtgtccttatccagaggctcggcctttttggccacaagggcatgtccttctccgcttcctgggatgtattggttcttggagttgacttggttgtccaggaaaggcatgatcaagctggatgccgcaccggcagcccgacactgttcccgctcgtaggaacccaccgggtcgtagctgtacaaagctcccacgccttcctcatccagaccagccagaatagcatgtacgtagtacgggaagaaccgcttctcgtagaggatagttgacaatcgctgtgcacatgctcccactgacatggttttcccatgttggtacttgtacatcttcaccacggtgtccagcttttccttgagagcgtttccatctgcggcgaaaccaacaacagaaagaatgatactagctccctcgccggtctcatcatcaccgccaatcttgaagactttgggtaccatgcgagagttgatattgtagcctgatgtggaacgagtgtcgccagcgaggatagcgtaatcagcacctgtgatgccgagggtggagccgccattatcggtgtaactagtgtaactgttagccagttttcctgcacagtgatcgagttgttccttacgggtagaacgagtgttgtttgacattagcggatgttggctcagagaaggagtatccgatagtcccagactggttacccatgagcgacgtcattttcggggatatggagcttgatcgggaggaaatatcagaacggcagctttataaaaaagactaaagggttggatgtagaggattctggagattgggcgttctggaggatggagagcaaagaagctgggtgtctgacgcgatgcggtagctgccttctattgattaggtaaggaatatccaagctccccgagagccctggagggctgtctctcgatacttacggcgcctcatttatttctgcatgttaagtttgacatactctcgttcgaaagataaacttgtccatatctctggatcttaccacagtgttatcctgatctccttcggtctcaacgcttatacctaggacgaattgcgacgtgatgcttggtcttggtgactatgaaagcaacagtgaggatgaggtagaacagaatggtccttcacccaattctcaggtattttcagctccgaaacaacggcattggagagttgctgatttgaagcaacagcgtaacaaggatattccacctacaaccttacaagctagccaggacgaaggtaacatgcctcttaattctccgggactagctccgacgattggcgctgacgatttattcagatcataaaccgtccagccaacaatcaaaagaggcacgcttttacatagccaccgattctgtcccagaaggaccggtccttggccccgcttctatcgacatggcgcccctctcggagaacaagcattcgacaagtggacgctcatctcccttttcggcttcacgtggactcgttcaagaccttactctccccccggttcccaatctagacattccaccatcacctcctgggtctcctaacccagccgcgaacgcgaaattcgagcatttcctcgcgctcaaaaagcaaggcgtacacttcaactcaaaattggccagctcgtcgtcgcttaagaatccaagcttgctgaagaaaatgatggaacatgccgggatcgatgagcaatcgcaatatgacacatcgctgccaaccgacttgtggaatccctccaatctacccaaatggggtttcaaggaagaactcttgagaacgcaacaaaatttccgtaaacaatcggaggagaaaaaggcatcgggccagcgaagctcggttgattttgtcactggatctgcttgaagattcattcagcggcaaccggaccaagaataccaaccctacagtatgccagatctaccatggtctcgggtgcatcagatctttccggaaatttgagcactagagattatgacctcaaacggcggctccagcacataacttgattgcttcgaatattcggtagcgcagtatttgcctgccgggcatgggaacttccgttttggtatcctacgattcaagaaggagggctcttctataccttcaagattatgtgcccatcttggagaaacatactggtggtcgatccactgactccagaaagaggatcaacgataccctctcaattgacatagcgcacacttagactcgtgtacattatcatacttgtggatcatacattgcaacaatgatgcttgtttcaacatcctccgccgccgccaccaccaccactagatgccttctgtttgcgcttcgccttctcatacaaacttaaacaagaaaccaacaccattcgatcaaagtcttctccgtattccactctgatttgcagtttcccacctctgcccagtttcgcacctgaaaatacggccaggacatgctcggtgtgctcatccacgagcttatagttccgagcggtccatttagacggtgctgaatcctcaacgccaacggtgcgtgttcgcttccataggaatgaccgtctctcgctctgagtttggtcagatccacactggactgtcatttcgaagcggtattttggtttgtggatgagttccttggtcatatcctcccactggacggcgttcacatcgtcggggtttccaatgcctattttgtaaccaccagacgacttccggaatttggagacggccacaattggggcctggctgctggtaccagcatggagagtaaggtcaggcttgttgagagtgaacacagatacttcgccgtagaacagaggctgatcatccgccgagttgatgtcgtagtgcctgtggaagagcctgttggtgatattatacacgcgtgaagggccattgtcaatggcaggggcaggggccgttgatccagcacgacttgaatcgggagaggacattagatttagaaataaaattatggatatcaattatttaaatattgtcaaatggagggaggtcacatcttttatacgagctttatacgttttaccagagaaggcgggattgacccttcggaagcgaatacgagcaccaaatcgggatggacagaagcacatgtatagacattggaagtgagtttattatagccaattatttgctttcatttttcttgaagatttgtattaaaggatataactactaaactagtataacagctgtagttatagtctacatcctcctggtgaacgcggagcttagtcagccgagctctccgtcagctcgactgcctaaggtaactagctccccatctacggagtatcgtcatcattctaccgtgctatccatctgttgtcttccctccttgtctgcaaaatacctccctttcgagcaccgttgaaactgtcatttatctccattcatcatgaaccactcacctgaagcttggggtcgcgtaggtggcacaactttcccattccttgctctgttgctaactatccgtccagcccaggaacgatgtctacggtgcctacgatcactcatatttgcagaccacaggtcccaaggcccatacctcatcccctgcagtgacgggaacgtcagtggtgggtgtcaagtttaatggcggagttgttatagctaccgacaacctaggtatgccgttccattgtcacgttccgtttccttcgcattcccatctgacgtgatatgatttgtgaaaatatagcttcctacggatccctggctcgtttctccgatgtgaagcgtctgcgtactttcggcgataaggcaatggttggctttggcggtgacgtttccgacatgcaatacattgaccgtctcctcgactccatggatatcaaggagaactactcgcctcacggcaacatgctcaacgccaagaacctgcacacgtaccttgcgaaggttttctacaaacgacgctctgagttcaacccgctgtggaaccatgtgcttgtcgcaggcttcgatgcggagggagagcccttccttagctcggcagatttgctcggaacgacattctctgctcctcatctcgctacaggatttggtgctcatcttgcggttccgatactgcgccgcaagttccccgagggtacccccctcgaacaagtcagcaaggaagacgccgttgatgccttgaaggagtgcttgaaggttctgttctaccgcgatgcacgaagtaccgacaagtactcgatagccgtaatcacgaaggatgggattgatttgaaggaggacgagcagattcagggtcagagctgggcctttgccgagagaatcaggggctacggcgcccagactgcttagatcctaatttacgtttttcttttacatgtaatgcacacgggactacggatgcagagataattttgggtctaaataaccacaatgatcaattgcaatgactgagatgtgcaggtagttatatacaacttgaaccagtaccaactatatcattggtctactgcaagttcaagagagataaatttagagcttggccttaggcttgtcaaagaccacgcggttgacacaggatcctacgccctccagcgaaacctcgacattatcgccgtccttcagccacaaagcaggcttgcgacccatgcccacgccttggggtctgtaaagcagtcagtctatcaaattcaaatcatttgcttgctcatcagggtaactcacgttccagtgaagatgagatctccgggcaagagtgtagttccctgagacaggaaggctatcgtcttagcgacgccgaagatcatatccttagtggaggaagactggacggtctgtccattcaacttggtcgagatagccaagttattcggatcggcaatcagactggaagaaacgataccaggaccaaacggagcccagccatcgaagcccttaccgagtccccactgaccaccaccccgcttgatctgccaatcgcggtgggagacatcgttaccgacagcatatcccaagacgtagtccagggccttgctctcggagacattattagcctctttgccgataaccacgaccagttcacactcgtaatccaggccctcgccctcctgggccagttggggcacggggatgtcgtctacgggcccggaaaccgaagttacgggcttgtagaacagcactgggtacttggggataggcatgttcgcctccttggcgtgctgctcatagttgagacccaggcatcggactgtgccgatatccttacgggccaggggtgcgaggggcatgcgcacctctgccacctggtcggtgatccggtactggccaaagatgtcgccttcaatgactctggccttggtggctttggcgatatcgctcactccggatgggaggatagcatcgccgtagtagatttggccgtccttggccaggaagcggatgaggtgctattaggaaatcagcatttgatgcagtaattgatttaatgtatatttttattctaagatactcacagtaaaggtagacattggggagtatggaatatatggggaagttggaagttcgaggggagacggtgacgaagtgatagtaatccgccattcggccgggaaaggcctctcttgtcagcgggaaacatgtccagctccacccaatgatttccacgccttttccctcttcatataataatcgagattcgcaatggctcggttctccggtctccagagggacgtcctgtctctataccgcaaatgcctacgggagatccggaataagcctgaggtgggtttatcatcatctcgtccacgtcacttcagctgataacctattctattgtaggactccaggatcaatttcaggaactatgcccggtaaggctctgtcaattgcctatctgcctatctgcctatctccctgtcatttcctttcctttttctctccccaaacgggcattcccctagatatgtgcaatccggctgatacgggaatacagggctgagttccaaaaatatatcgcggtgaataagaaggactttaataccgtggaatatctcttgcgcaaaggtcatcgacagctcgagttatatgctaccccgggaatccgcaatatccgatgagcggatggggccaaccccagaatcttggttcctcggggtgcctacacgctagctttgtatgtttcgtctttcagcctcatatatttaccagtttactcattggaatagacttggagatctccagcatcgttggttccaggccgaattcctgcgaacatgttgaacattaacatgttgcgcgaaaggcaatatgtctgatatggtcgaggccttgctttggaagcattttgtataatagtatgtcatagtatatcatagaatgatcagtcattaaagctttgtcatgttctacctacataattagtttggttaactatgttgtatgtacgacatatattcgatgactactccgtaccggtactatcagcccttggaagtttcgagtaattaccaatcacacattattcatgctgtctaaaatattcatttatcagattattagagtagtagtattcagcatataatgtaacggaatacatagaatcaagtggttgtttctcgaagttggtggaagttgctggcggccggtcgaatgtgccatccgtttctggacgattccggaagtatagcaaccaccatcaactataacgaagcagaacatataaaatagcagatattccaggacaattagaacagaacacaatattcaagacaatctctcagatcatctatcatcattcttccaatcttcaatccaagaatcccaaactcatctacaatggccttcttcactactcaatccggccttgggcccctcttcgtactcaatgagcacgagcttgccaaccaactcaagtctccccaatgttgcaaatccaaccagtgcaagtccaaccagtgcaccaagtcaagccaatgcaccaagcccaaccagtgcaccaagattcaacagtgcaccaaaatccaaacacccacctcctttatgcccgcctttgacgtgcgcgagttgacgcacgcctaccgcctagacggcgaactgccaggcgtggaccagagcaacatcgaaatcgaattcaccgatccccacacactcgtgatcaagggccacaccgaccgcgagtacatcagtgatgacaccaacaacggctcagcctcagccagctccagccgcagctcgtcagccgcaggctggcaccaagccaccgtcgaagacgaggacgcagcgtcgactgctagctccaccgacaccgctgcttccagcaatgcggtttcccacgctgccaaggacgaccagccgcacttctgggcgaaggagaggtcgatcggtgacttccagcgcactttcagcttcaccgcgcgcgtcgatcaggatgctgttcgcgctagtttgaagaacggggtcttgtcggttattgtgccgaaagaggctgcccctacgccgaagaagattcgcattctctgatttggaatcgaatcgagtggttttgctttggctttgaaagctatgcgcttgtataattgattgcattgggatctccgggtggcgtttcttttcccttccttgcatttttacttattttttacttctatgagtttactgatatgatctgattggaatcttgttacgataataaatctacatcgatgtttattatattgctatcccgtctgtagacatgtaatatgcacctgatggcacttgttaggctgtaagaacttacctcgctacttcgaccctgcgtctgttcttttaaatcaaagtcccttgcttgactagataaccttacttcgtatgcaggaatgaccaggaaaggcctgagccaccgaactagccacacggtgaaagactgaggtggtatccccacgcatgcattagactaaatggccaagaaaaccctaaaattacgaaacaacacatggcatacggcagacagaattcatggatttgtgtacgcaagaggagacactaattccatccaattccaaaagggtatacctaacaagactctatatccagatgtcccaaactcccgccaaagtaaaaaaaacacatcaactccaaaatgaacttttgacgccatgggcaaaagagacaaaatcaaaaataacgtccaagacaggaaacttaataaaatcattaccaaaattgtcgataaacagaagatggataaacagaagatggggaggtcatcatatgcacaaatctgtctggcgggcattcgtcaacctccggcggtagtcattgctccggcttcgaggccggcctcgcatcggctcggaaggagacaattcagcgtcaaggtctaggtcgtcctgcaagtagcctggggacgtgatggtgggcagcgggggagcttcaacgcttgatttcttgctccagatgcttcccagttggctgttggaccgagagagttgtgtagcgtactcttcattaatttgatattcagaggccgacctgcgaagtcgctccttcgtttcagtagtgtgctgttggtgactgagtggtgattctccggttacggtagaccccgtactagacgcaagatcaaacgattccatagacaatcgatctccatagaaaggccccttggtgaagccttgacactgtggaacataaaccagggaggtggatttgacttcgaggaacgagtcgcgcgaagaatattccgtgtatcggggcgcacacaacgttgaccgacgcgatcgcgatggagcgaggtgagtcgggtcgcttgaatcgtaccagcgagcagtggctggatgcagcgttgagtagttctctgactttgtcaccaaggtcagggaaggctgcaatttatcgctcgatcgattcggcctcgggatacagacgttctttgagctgtctgcaccacatgagctagatgtttgtgagtcagcagaactgtgagttcggctccgctgtacggagtggactgaagtggcagagctgtagccactgtcggacttgttgagggattgagaagtgctccgggaaagaccagcgtccagagcacccttttccaagtgaattcttgtatcgtcgaagaggagaattccttcatcttcggaatccccaggaaacagtgattttgtccgagggtggactgtgatagtaggagacttttcgaaagagaatggactgcctggaacatcgtccactttcttcaagtcgggcagggacgtaatctccagggtggacttcctggttggccctatgacctctatgttctcaagcccaagtccagagcctggagcgccgggcccatccaaaggaattcggtcgctcggacatggggaggccgaaccatttacaactcgcaaagaccccaatttaagtgccccgagctgagtatatcgggcatccatcggactcgtcggacgcgccggagatggcaaacgcagcgatcgctgggtcgaaggcaatggccattgcaaaacggttacctccgtcggatcctcgatcggacattcaggctctccaatgggcgaagggacgcgtcggattgcgcctgttgttcgtcttgtggcaaccccgggtcgtgtcaggagcgatcgtcgacgcgttaatgagaatcgttggttgccaaccaagaagtgggtgttggaggatgtcgcatccccgatgtggttttcataaacagcgctgttgtgtctccgtaagggaattcgagtcgaactggcccgccttggtggctgctcagaaagaggcgagcgttgggaagatgcttcccaggcttccgattggtaggacgttcttctcgaagagctcgcgctcaacagggttggacgggtcggatgacgctgcgttggactctgctcatatataaacgttcgatcctcaatcggggtctcttcggacgactctgtttcaaaaagggtaggtgggatctcggctttcttgggatagctaccccttttctccacaggggcactggagatagtgttgccaacccaagggttttgccatcctattagccctgatctgaccgttggagagtctgattcccgttcagaactttggccgacatagaacttctttgtcaggggctttgaaaggcggttggaacggtgggtctcgtctttggctttgctcgaatgaatgttgcccatgacttcagaagcagatgcaattcagatatgctctggccagattcaactgggcatgcagcaggggcgagaatgatatacaattagaataagggcttggtgacagtatgatcactgttccccgcacgacgatagggtgacctagccagatggaatttccaagcttgtcccgatagagcttttcagattagatcgcaccccggactaccgacgccaagcaacgccgtgattgatcgcaggagacgtaatccgagccccaagctcgtgcaacggctgggttgggaattgagcgtacgattggcggctcagggttccccaacaatcccggagataatggggaggaccgcgtttcgaattgagtgcgatgcagaaaatggttggactggagagatggacggctaatgacggagagaattgaggtaacgtcgaaagcagatagcccttgggaaccggaaagtccccttcttatccaaagcaggatttgaggcgttcacaatctcagctgccggggaggtcagaccaggtgcccaggcgtagatcggaatcagcagatacacgatcggatcaacattaagattatagacagacaatttgcaaagaacagaaataaaaaaaataagaaaaattcacaaaaaaagagaatagtgggaatagaaattgggcaggatagtgtcactggggggaccacgatacataagaaggtggggagagaatcagacaaacgaagtgtatatgcaactaaacgctagaaacaaaagaagacgcaagcattcttttttttcgccactaaaagacttgtatacgcgcctttgcatcagatgaagctgcatgcagaggaatgcagaggacaaggaacatctccacgcgggacaggtacctcttctgccggaaccgggagagaaggatgtatctagtacgtgagcttagtatgtagaggcaatacattatgaaagtaccaggtacctcattgcacacgtagtatcccaacaactccattgttgctttcttctctttctatagccagtctgccgcaatcgtctctccttttcctctcatcttttccaatatcggatgtcttctcctctatctttgatttgatatacagtaacagtgggatcaagggcttttactcttgcgaaatccctaccctgaccacaccgcattcacagctgagcatctgcatccggcgctggtacggagtagctgacagcactctccccagcttcagccgcatggccgcatcttgctctacgttccccttcctggcgcagtcggagtttgaggtggcatgtcaagatcttgccgatcgatgcattgcagcccaaaatattggctggtccgccattcgactgctcacaaaggtatccctttttctgatgcatgaaccatctaaaccttatttggcccttgttttatatacgaaataagaatggaagaactgatgggaaatatggtttggatgaaactagccagagggaatcggcctcagaataacaaaatgtgtcaatgtgcccaacccgctagaagagccgctagaaccctcagccctggagaacctcgaagaatcacaggacgaggatccggtctgcagaattctagccccccaagggacgtgtccacttgtcctgactcttcaccgcaggaagctctcgttcgcgccaaaccccatcccagcttacagatcgattatgacatcttgttgtcccccacatatcaagtccccgtcttgtacttcggcctcaggtggcacaaccacggcccactcggactagaagaagtctaccagtatgtcgtgccggaacgatacaggcaagaattgaagagtgtgggtgtaatgggtgggattagtatgggtgtaggtgcattctccgaacctcgtgacaagagctcatgtcttttttgttttttttttcttgtagtaccatcctggatctggcgctccgacatttttcgtccacccatgcaacaccgcggatgccatggcgaacattgcagacgcacagagcgtcactcccgggtcatatctcctcatttggcttggcctcgttggtcattgcgtgaacctgcacgttccacgcgagctttttgcttagcagtaccagccaataatcttgcatatgctggaaacgctggggaataaaaaaaatcaaaatgcaaatcgaagactccaagtctttcttggtccccagtagggtcttattcattagattactcctcatcggaggacgcgtccataggcacgtcgctgtcttcgtccatcggggcttcttcgttgtcgctttcctcttcacgcggtcgcttcacgccatggccctctccattagtatcggttgtgggtcgtggagggagtgcaccgggaggagcaccgaagatagacttctggaggtcggtcgtgacgggggctggcgcagtctcaactggcgcgacgtatgtgccccgaagtttggaaatgacattcgatgaccccttgccgtacacgattttctagacatccattgattgagcggggggttgcgatgaccgaagcgcaatgaaaacataccatctgtttgccgaaaaaatcgaatccttgtaaagcccggagtgcctgcgtactagcttggacatccctgaacacaatatgggcttggcctcgcattttgttggtcttcatgcaaacaacatcgagaacggtgccgtatgtggagaacaaggcatagagtgcggttcggagatcctgtttctgaattcttctgtcgggcaaatttgtgcagtagagtctaaaaattgttagcgccaatccgcgacaatctcctgtgcttggaagggcaagctcacgtctggttaggagcgccagtagcgacagccttgctgtcagcgcctccacgggcgggctgtgattttgaagccatttcttggatgattagaaatgggagagattctgccgtttgactgaaggagcaaatgagattgcgtatgggaaaacaaagctcaatcgcgtgtggtgtccattaccactcaaaacctcgacataaaagtagcttggggtcatgtgatgtacccacttactaagcaccgtcatcccccagctcccctcctgatcccgcaactacaacaatcaagtacacaagcacgacggtagagagatcctcctgtcgttattatcaatatgaccgctcctcaggttcaccatctcttccacgcaccaattgcagaccactcgttctcatccgataagaagacacttgctgtcgctcgggagaacaatgtggaactgtatcaacaatcaggcgacaagttcgcgctgagcgatgagctcaagggccacgagaagactgtcaccagcgttgatatcgctcccaacagtggccgaattgtcacttgctcacagggtatgttttggccaacctccttttactatactatatacaatacctaacggttgtatagaccgcaatgcctacgtttgggagcagacccctactggatggaagcctaccctggttcttctccgaatcaaccgtgccgcaacctttgtgcgctggtctccatcggagcagaagttcgccgtcggctccggcgctcgagtgattgcagtctgctactttgaggaggagaacgactggtggatctcgaagcacatcaagaagcctattcgcagcacgatcacaaccctggcatggcacccgaactccgtcctgctggcagccggatcgaccgattctcacgcccgagtcttctcgagcttcatcaagggcattgatacccgcccagagcccagtgcgtggggagagcgtcttcctttcaacaccatctgtggcgaatatctaaacgatactgctggttggattcagggtgttgccttctctcctagtggtaatgcgctggccttcactggacacgatagcagtgtgactatcgtgtacccgagcgctccagagcagcccccgcgggcgatgttgaacatcgctacccggttgctgccgcttaacagtcttatttggaacggcgagactgagatcattgcagctggacatgtaagtcattccttttcagtaatacgacttgcgctaaccgtacctaggactgtgagcccttccgtttccacggcgacgagaatggatggcaacttgctggctctctggagaataaggctagagaatccggaggtgcccgcgaggagtctgctttgaacatgttccggcagatggatctcaagggccaggcccaggcggacaccaagctcaagtccacacaccagaacactgtgcacaccatccgggtccacgaagaagccggcggggttgtgagcaccttcagcagtaagatcaccgtcctgaaaacttgagatgtacgagactaacatattattatagcgagcggtgtcgacggccgtgttgtcatttggaccgtctgatttgaactacgtttgaatgctgacctcagtccatggtaagtatggttatatagtattggatagaatttttcgagtacattctagtctctcgtgacatacacgtagttgtagatctatgtctgtagactgtatgttgtgctccccggtcgtaccttccaagattgatcgacataaaccgaccaatgaggaaatcgatgacataatagagttaccccggattctggtcacctctccacatcacgcggtcatgctctcttcctttaaagatggatttataccctccctcctaccaaattcagtatgttaagccatggctagcattttactccttcctttgctactatatatctgtttcctgagcttcgtctcagcccaaaacaagacgaaccatgtctcaaacgacctattcaactccctggaggagttatcccggctagtggatatttcatactgcgttggaacaacgggagtacagcagccatttcagtgcctcagccgctgcgatgagtttcccgatctagaactggtaaccgtgagtcatatccctagtcaactctaaaagacacacccactaacctaatccaacgatcccgtagacctggaacaccggcctcctcctctccgattcatgcggctacatggccctttcccacaccccctccgccaaacaaataatcctcgccttccgcggcacctactcaataacaaacaccataatcgacctatccgcctacccccaagcttacgtcccctaccctgaccccgaagaaaataccactaccatcccaattcccacaggacagcactgcgaaaactgcaccgtccacgccggcttcatgctctcatggctccagacccgaacaacaatcctcccccagctctccctcctacacaaaaaacacccagattacgccataacgctcgtcggccattccctcggcggcgctgtcgcagcgctagcaggcctcgagatgcgtctaaagggctgggatgcaacggtgacgacgtttggggagccgatggtcgggaacgaggcgttcgcggcattcctagacgagcaattcggactcggggatgggatagcgatacccccgcttgaaggggggatgcgttttcgtcgtgtgacacatgttggggatccggttcctatgctgccgcttgcggagtggggatatcggcctcatgctggggaggtttttattacgagggaggagctgccgccgcgtcgggaggatgtggtttattgtgttggtcgggaggatcctgggtgtattgccggtgatggaaatgagagggttttggtcaagttgtatcgggatttgaatgttcctgttgggttggttggttctagtagcgaggggtgtcggtcgagcggtggtggtatgtctgaggaacaggcagtcttggaacgtgcgtgttcagatcttcctggtcgcgaggatagattatcgcctctccgatgggattggtctcttataccggcgaggtatcggatttgggagcttttttacgctcatcgggattatttttggcgcattggtctttgtgttccagggggagatccaactggataaagtagtatatctatttattctgttggatgctggcgttggttgcttttttactattgatataccccatactgtacattatcaggtaccttgctttacgagaaactcctttctttctctgatatatatcacctatttctaagattacttcagaacaatcgcaagtggagcctttatcaaatcagaacagcggtataattatctcaatatcaacagggcatgaacataaaactagggcgcataactcatgctaggacagagaagaaaagcagcagatatacaaacacgccaaaaaggacaaatgaaacccatcagacaaaagaagagcaacaagaatgctgtgcaagaaaaaaaaatagtccctcaatacatatataaaaatactcaaccttcaaacctcatcaccgcccatgatccaaagacggcacaataaccggcccaaatttaaccacgttcccaagcgccccttcaccctgaaccataaagtccgccgccagactcaatttaccgaccgcggcaggcgggacatggccatatgaaggattaaccgcctcagggtcataagcgacaatagcgacgtagttccgacgtgccatgagcttgcggtactcacgaggctggccgttgacgtccgtctggaagatctccatcatgtcttccttggtgtcgctcacctggccggaggatctgtggccgttggcggggatgtagaggggcttgctgtggctgtgcaggagcttgatgatgtacgagggcggcggggtgttgacgacgggcgaggcgatgagttggtacattgtcttgtggtcggatgggtttgaggggtcgtggacgagacctgcgccgcagacgttgacggcgccggagaggaaggtcatacggattgatttttggtgcgcgatgccttggagtgtacggatgagatatgtgcgttcgaggtcctgggttgggttagtatgtatgtatggcttgagggtggatgttttgtgattcattggaaaagggacaaaccttcgactcgtgtgtccattggtcgcgtagctcgtccatcgagttgaattcgccaaatggactcaatataccacccatcagtccggatttacctacggctctctttaccgagtcaaagcctgagccgacgaactccttggcgccgaccaccccggctactgagctggttaccttgcctagtacgttgtatgcgccggtcacggctcgctttcctgttgcgacggtctggacgatgtgttctgctgtctctaggcgggggtagatgaggggcacggcgatcatccagatacagtgctgtacgctgggtggtagcattgcaaccttcgggaacagaccctggtacgtgggaccggccatgacttggtgtgggtttcgttctgatcggcaatctggtccgacgacgacgacgccgggaccgaggtatttaacaaagtgccagcctgtgccggttatagtgaagaggtccatgtcgttgctgacgttacggaggatgtcgagagttgtgtgatgctggaagaggagatacatctcgataccgatgcggccgatgttcttgaacatgttcgagaactgcatgtgctcgggatacgagccgaatccatcgaagctgtgggtatgtcagtgctgctcgtagactgttattgtatggggactcacatgtcatgatcatcgatctggcagacataaggaatctgcgcaaatgactcccttatgtggggttgatcgaagtggctggtgtagtaatggaagtacgcgtaagaaacatcctgctcgttagccgctgtccaaggcgcgttctttctagcctctttcccgctgatggtcaaccactgcttgagagacggaatctctttccacatgcgatccgcatagatctgaccacccagacataactgggcgtggaagcctccgatctcattgtgcttttgcatgatatccctccacatgtaaccgacgccacccagacgagcccgctcaccagcattaacattgagcgagaagtcatttccagaggtagcaatgaaccgccagttggtttcgtatcgaccagcgacaagaaactcgtagcgagtgcaaccaaggtgtgaggtgatggcgtatgtccatttagcaggacccgcatcgtccatctgcaagtcaatctcatacttgtagaatgtccagcgttgatgggcggcaatgttgattgccttcaactgtctcggatttggagacaggtctagactctgatgcatgtggattgtgggtggctgcgcggcatctgtcacaagcaggatagatcccaaccagactccacgttcgagatccatgttggtgtaacgcagataaggaccgaagtagacaccgttggttggagcgtttttgtaaagatccatgccactactcggaggaggcccagagaatccagacattatgggagactgcaggctttcgaagccaggggtcagaggcacacccggcgatgctagaggcttcccgaaagctgacagacccggagaaactagcgggtgggcggtatacacacttcccactggggacaagggcgtatcgttgagattaagcggcgtagggcccttcgggaactcccactgagttgactgtgtgggcaagtggatgtagtaatactgccccgagctgggatccatgtgggcaatccacccttccggaagaggtggtggagatgctggacctgcgccagagggccctggagaagtcacctggactgtctgatgatggaaaccggacaagtcattagcaacagacgcctgaggggattgttcctgtcctgtttgctgttgctgtctctggtcattcgcaaaagcgggatggtcctgcggcgacactgccggtgcaggggaagaggcttttgtagcagggttgggctggtttactaaggccgggtgcattattgcggctcctgctgctgctgttgctgctgttgctgccgccgctgcagcactgcttcgcttttcagcgggatacctattcgaagcagaaggaccggatacactcgagtaggcgggagggggagaggagctaaggcgcatccggtccatgtcttgttccaaagcgttcgggggaacccttcccggctgttcttgctgctgttgctgtagcccagatgcagggtgtatttgggatggtgatccgccgtatgaccctggtatctgaggcggtgggctgctatattgtcctggatgagcctggggttgcgggctgctatattgacccggatgaacctggggttgtggggtaccgtattggccaggatgcgcctgaggcggcggactactatattgacccggatggctagcagacggctgatgatcatcattgacgacctcaccaccctgataaaccgtaggcggcccatgagggttcgaacccggctgctcagtcggagtccacgggcgctgctgctgctgctgctgtgggacaatcggctgctgtcccgagtactgctctgctcgtctctgtgcagcgacgctatgcgacgactggataccctgcagagtcccggtgcccgcaattccagccgcggcatagcgggcctcgatatccgaggttggctgctggcccggtccgacgataggagtctccggcggcgggggcgagccacgctgggcgcgggttgtcgaggtagaactgatgcgattgagcgggccttgtgcggcctggagactggacgggggacgggctatagacgtagagctttggcgctgagggggcgggtagtattgttgacggtaatcatactggcttgtgtttgctggtggctctggtgggccgggtggttgttgttgactggccgggggtcgggggtacggtctcgcggctagggcttcgcggtctggcgcatcgtagctgggagattcgggcagcggctttggggctgcgcctcttctttcggcgagtgttgcgactcggggctcgcgaccgtcccgcggtcgcagcgatgttgggtattcgtttggactcacggagcccgagccggtgccaggaccagctggcggagacccgtatctgatgttgtcgtgatagcgctcgtttgaacttgaggggcgcatctgcggacgttgacgctcgtccgggtagggtagcggggcgtttggtgggggactggagcccgcggccgatgctggggatgatgagtcccgtttgttgatacgtagagggccgacagtgggtgactcttgtctggctgggcggtcgaggaaaagctcctccggatggagggcacggctgccactcatggtgccgtggtaaattgcggctgggcttgaagctgtagaagacagaattcagccaccgcaggatgcgaggtactcccaattacggagataagcgcgaagatcgttgggaacgggtggtagatgcggggtgggaaaactatttcatctattcataggaattgtccgagagtaagaggagaacagaaaaagaaaaggagaggatcagggagattatctgtagccgccaagttggcgagacgccgaccccgcaggtgatgagaattatcacaagttgctgccttgtggcctgctacagggatgtagtacgcagaaatcgaggcagagatctattgacatccagttcccatacattctaatctatggctcggcccgagcagttccatggaagaacggaatatcagattccacatgttcgtttatatacatacagtccatatccatcatcaatcatgctaacatacaaccctgatagtccccccaaaaagcgaatatgccctagtaagcgccaatgctctgtaaaaaagcaaaaaaataaaaacaaaagaaaactccactgtccaatcaaaacccgaaattaaccatctgaagtccctcctgagccatgaggtcagaccaatccacatccaatgtatgacccacatgcatgagtcgctccaactgccgctcatagacaatctggaggatggcacgagtcgttgctgcattgcggcccatgccgtcttcctcgtcttccatgctagtcatcaattccatcgccatcatcttcaatccactagccgatgccgtagcacccgctaggaacaaggggaagactaggaagtgtcgatcagcacgtcgagtgtgagtagtccgttcggccatgcgcaggatctctgttacgtggtggtcgatttctgcgtctgcggagaactcggactcgacgcgttgtccgggccacatgctgctgtaggagaagagttgacaaacatggtacaatgtagcagactagaaggagttagttttttcttcctttgaataaacgcaaaaagtagaaagaactgacctgctggatgatttcccgagatcgccgcgggaggttgtcctggtgttggtgtaggaaggcaacatcgggggattcccacagtctcccgaaagcctgacgcagatctcttaattcctgcgatctcttatcgaactccgcaaagggcaggctctgcttatcatgacgaagccgagcagccaagaacccaagttgagcagctagccggaatgtgtcgtggtacagacgcatgatcaccggtaagctctcatgctcgtcggagtagatcacactgtagccctctggggcggaagggtagagaagacattcagacccagggagcatctggtggtcgatgacggctcgtacaaactctcccgtccctgctccgctgaacagggcgtacaagtcaatgtggcatacccaccagaggataaatggatggggctcttggccatacttggcccgtcgaaggaaggcgatgtgaaggagacgagagatatggtgagaccatagattcgagccgtgtggctcggcggctgcgatctggggattgtaagtatgtagactgagaaattgcaattgcaaccgcttacctcgtagatcaggagcaggaagtgcgtaaggaacagtccgtcggaaaccaggtcatcgttgttccgtatactgacctggagcgaggggaaagcttgctgataatattgtagcgcatcgacattgtgacccgtgccgctgtgcgagagactaagggctgatacagccatcatagcgtgggaaagctattcttcctgttagcaggcatcattgagaacaagaatgcaatacccacaggagggaaacgagtggcttcctgctctaggaagtccatgctgagagtcataaagtgactatccgatccgcaagaatcatcaagcctatggtcgcgagggaacaactgccgccatacgacatgacggaaatgggaaaagatagtagaatcctggctttgctggtccaggcgcaggtccaagaaagtcatctcctccaccttcacatccggcgaaggaagagaagtgaaatttggagagagcgacagattgcagaaaggatccgagatctctgaggttggagagatcttcaaggtcttcccgttaaacggcgagcggcgagtgccatcttcaaaagtcttcaaaatgaccacattgggatcttcgtctctcacgtcgcccttggccgtgctcgtggggctactagccgcagagctcctacactcgctggtgggatttgatctagctcgctcgattgcatcgtctgcatactctggcagcgcggaaaaactgtctggtgtcatcacgacatggtacgtgccgggactaaaggcttctgctttcttttcccgctcttcgtcggaagtgagcaggtaaaagggcggaagggaatccctggaagagaaataatcggttctctcatcattggaacacggcgaagtgactactctagttagtatggactagaaaaaaaaaaacataaaaaaaggtacttacgatcccaaacgacatggccgtccgtcttgacatcggccatgcggcccatgatacgaggggtatcatcgcgaaaagccaggcgcgggcgataatcgcaagtatggcccagccgagtacattgctgtcaagagcatgagtaaatgtggattttagccaagcgtgaaagaatgcatacattacattgcgggtgtccttcatcacatttgactgaagaatgtgagtcagcaacgaaatcggagacacctgtgcaagttgtccaagtcacttaccctttcgactctgaaaacgaagaaaaacagacgaattagttaactgcttcctttttgaattaaaaaaacaaaacaaaaagagactcactcgacatgtcctaaaataaataagcttggattcccggttgagtcaaatatagagacgatcaagacgatcaagacgatcacttaccaacaaccggtacgagatcgtggaggcaagcggatgcgcggtggagcgatcaagaccttttcggacttggcaaaggcatcgaagagatcttccttgggggcaatgatgggtaatcgcaaaggaggtttcccagagactttgctccgtctgtgttgcatgaccagactggccgtcatgaggctgctaggatcagttgtaagtacgggctgaattgggagacttaggggacgtacggtatatcaattcaattgtcaaagatgaaagagagaaagctagagaatgagaagaatagggcgaatcaaagataaaggaaacaagaggttataataagatcgaaagggaagagaaaggctagatgtatggaaaatgccgtttatgggcgcaggtatttggacgggtggcgggaataaagggaaatccaatggggaaaaacagagaaaaatatataaataatgctgaaataattggattagcgcattattccattattctacaggtgaattatgtgggaatcagggaagaccagagagctaaggggaacagaaaacgcaggggaaaacgatcgaaccaaaagccaaaaaacaaggaaaaaacgcgaaaaagaaaggaaaaaaagtcaaaaccgaatggcatgcagatgccaaccatgtggacaggcgaaagtcgaacgttgctattaatatgagattacccaaagctattacggactaaggggaactaggggaactagaggaactagggcagagataggatggccagggaagagacaacctcgggaagtgcccaaggggctggctgaagccacgtcgaacgagaaacctccctttttttttatcggagccgaggaatgggctcaattaggtagctacttacgagctctggggggaaaaggaaggaaaacaacgagcaagtctcgatcggccgcgacccccggtctggatcgcattgagggagcgtgggaaatcgaagagatcacactttggcccattctcggaccagttgggcctctttgggacaagtcgcgatgacttttagacattttgggactctccgcattctaaacggacttggccgggaattaagcgagtggcgcagacttgagaccactcgcgacaatccaactcaatccaacttacccagtgctgcacctaggcggacttctattggcgcgattcctatgttggccctcgtatcgaatccttgtacgaaaaaaataagaaataagcatctttcatgatcgactggtaaataaccttggaagacaatgaaaaaaccacgtgggaatcttaattcgggaacgccaggacctcgtccaggagccgttgcactggtccggatcgctcgctggctctccactgacgaacacaaacgagaagcgtgtcaggcacacccgcttgggcatgcggactcagtttccggtacgccagaatcgcttctgcacgacccttacggatggcctcgacagacccgtctacttcccccgtgagaatcttgtccgcgagagcagtcaagggtgctgccatctggttaccggatgcctccggtgagacgatccacagatccactcgcgcaaagaacgcccggagctcatcgtagaccgtgctgacgacctgtcgtccaccctgttggaccacttgggccagtggaccagtcatctgttccacgtactttcccagcgctgtggttagtgttagcaaggtatgacgctagggggttcccacaattcggggtggaatttaggggctttaggggctttaggggctttaggggaccgaccttcacccgaaccggcggtggggttgaaacattgcaggagacattgtacacatgccgcaagggtgtcgtcctgggtcgagccgcgcccattccgcgagtctatctccatctggtcttgatcttgctcttgcatctcttccaccacccccggaataatctttaatgcgtccggcatgaagtcgaggtccttgcgggcctgtgcgatctcgcccattgcccgcagtccatgcggccggtacaggacgttagctcgcttcgcttcgcgaaccgtaatagtctgacatgcgttagcctcgattttgcatctcgtaaattataatcatgggggaaaagtggcgacatatcagcccataccttcatcaggtgactcagctccccattggcttgccacaacttctgagcttgcccactaaatttcactagtgccttgagcaccacttctttaccttcccacgtcttccccgccagagcccgctccaatacgggccaaaccaattgagccgtcgggaggtcaatctccacatcaagcgataaaaccgcttgcgcaatcgcccgggcggccgtgtgcttgatagcccagcggggggattccaaattgtccgaaacgagacccacaatctcgcgaatgtaaagcgacacggcacgcgatccaccaacgttatcttgccatgtcttctcaaactgctctttcacatgttcatcgccatcgtgcttacacatgaagacgaacggcaaggcgctcgccgcaaatgccatgaaccgatcgttggacagtttggacgccgagtacaggatctcgccggagatcactcgcggcgtggcatcctcggctgttagatagaggttcttggcatagtcaaacgtcttgagaacccgatcgtccgaagcgagtcgcagcagatagcccatggatgagcagtaggaggcgctgacggtgtcgtttcggtccaccacgtacttagtgaggataaggatgaatcgatctgcgtatgggcggaagagcaagcttttcatgctaagcagcactagaacgcggctacagcccaccttcgttggcaggcccacggccgaccgaagcacatcttcgagtctctgtgacagttcgtcaagattgctttcatccacgttgtcaatcagataccgctcaatcacctccatcatcggggatgtgcggatgctagacaggcgcattttgtcaatttcttgaccggtcagaccgtatttgtccgcattgaggtggacatagttgacagcctgtggttccagagagctcagagcactcaggaacttctccagcatattgggaacatatgggcgtagtaagctgccggggctcttcttaattattgacacaagagcaccaatggcatatccttgcacttcctccacgctggaatccagtcccttgtcgctcagaaggaagggaatagcactttggagtaaagtacctgcgcgcttctccgtgccgctggtctcgagtgtgcggataaccgaattggtaatggtttgacagagcttcagcgcagcagtgcggacagattccttgatatcatccagcagtttgaaagccttgctgtaaatctcatcaagatactgggcgtacttctccggacggcgaccttgaattaagtctgccacggcagcgcaacttgcttgccgaacacgccattctcgaccagctagaatgctcttgagaagatcctgcatgatatcatcaaagtgggtatcgatgacaacagtagggtccttgactagtgcttgccagatagtgttcatagacctttgcacgtttgggttgggatcgaaccggtaacggaaaagcttggggtaaatcttagggttcttcgccagatagccatcgacgctggaatcagaaaagatgctgctgattccgaagcgaccaaatgccgcacgatttgtccaaatagcattgtttgaagccagtgacatgaaccggtagaccagagtggggtctcccgcctcagcggccaggctcataatatccttgtaagtgttgacagacgacccttcaccagtggggagggctccaggctcaaatagctgggtgtctgcctcaatcttgccaccaccgagattgggaccagtcgaagtgaatgactcgaccaggtcttggaccaaatcgtctttcagggattggtcgccgatctcataaacaaggctgagcccgtgcgctccagtctcctgcactacctcgtcccggtttccaaggaggctgctgaaagtagcttggcacttacgcagccgctcctgcatctcctgcatgtgaccgcagttcttaactagcgacaacagccagattgcagatgccttgcgcagagatggcttgggcgcaatgcaatcggcaatgaccttgtcacagatgactgcaaataccgagcgcgggacgtctgagcgagggaattctgcatctacgtcgaaatcctggataagagcccgagaatcccaaccaacagcgacattgctcaaggcgtcacccacggtgaattgtacttcgggactgcggatttcatgtagactgtagagtgaactcaggaactcgccgaacaaggtattatccgggccaggccgggaaaaggtcagagtcaacaaccccagagagctgatggggatttgattctcggttttggcgtcacgcgatagcttttccaaaattttcttccagccatcttctgtggtaatatcaagatgcaacacgcccgaaagacttagctgtccaatggcctcttgtgcagtcctttggagcagagtatcacgggaaacatctaaaatatcgaagagagtctcagtaaactgcttgatttgtgcttctggggctcggctccctagaccgcggtacgcaagtcgactcaacaaatacgagagcgccagaattgcaccacgggctcgcatgacctcttgaccaacagcagtattccacgattggatggtagcagttagttgggtaatgaaactctttagttgctcctccgagaaggcaggatgcgaaaccagaattccaaatgcccgtgcagtaataccctggttatcctggttgttgctgcaaataggctccatcaaggatgacgcacgcgagatcaagtgttgaacaacgtcattgggtgctagcgagcagatttccacgaaatgaataccacattgccgcaggccttcgcgctcgcccgttacaagaccttcgagggtgccagacaaaaatgccaaaacggactcctttgcagactctcgaatgtagtttctcacggctgaacgggcctccacgctagtggagagaagcacttccagcttatagtcccaatcttgttctagatctgcagcaactcccgaggctgagaacgcctcccagagcaatgtatttcggaggaatgagatggcaggcataaatgaacctttgtaggggccagaaaggagttgcgacgcggacaaagcctgaacattcaagtgttcctcttggccccctgagccaagcaggaagcgagtagcctcatcgaactttgggaagtcgaaccaggattcgtcttgaactggagctgccgatgaagctgaccatttcccatccttggcaggattaaggagtcggtaccagtaaggatgaagacctttccttccttcttcaacgatttcttgttgcctttctggacctcttgcaatggccatcaaatcaatccaacgggcgaccacatcaccaaacggcaagaatcggttcgcaaagcgcactgcggcatactgaacacctcgcacagcacggaaaccggtgtcaggttcaatatcgccaggctgcatgctcatcagacgaaccaagaatggccgcaattggtcctggaaggtcttgtcgtggctgtccaatgaagagttgagaatactccctagtgcctgatcgatgctgacgaatatctgagaactcgagtcatccgcactcaaggaagcaaagagccatcggaccaggtcgaattcgaagttctctacagcaccggcttgcaacgtaaagtcgaccttaggaaccatgataccaatactctcgtaggcaagacctcgcaagttgaggtctgttgtgggtagtttctgcccgctagctgccggactgggccatccttgggactgaatgaaatccctcagccctgcaataattatgggcgcgattttcttgagatcagacggtgcgcccatacggaccacccaagtagtaaacgtaaaaatctgggtcctcagtttcgacgcttgtaacccctgagaggatctagcagagtctgataggagcccatcttcaatgagcctcaatattcgctgggggtcagccgtagctttgatggacttccccagaaagacgagaagcttgacttggagcggaggccgcgcgggaggagcaccaccagcgccgaaatacaaatcatacaactcctgcacaacatcaggattctcaatatccacagcaaatcgcttcagagtctcatctccaagatcagcaaggcgggagttggcatcggcagaagcgattagtgaaggcaggaatcgttgtggatcttcaaaggcaccgcttccgatgaagcgaagagcggtgacttttgtctcggttaaattcaaaccaccatcggtagaagggttccatgtctcgtttgcgggagcacccttgttcaagaagttatactcgtctggggatagaccgggacatgttgaagtttccttggggccaggggtaagaagtaacaatttcgccagccaaaaggacaagaattgggaatcttcatctgagagaccgagtcgggctttcaggcgctgatcttcttcgctgcccttcgatggcagcttaagaagtggcaatagacgcaaaaccagattaaatacgatagcaccctgagtgggtgacgtcccgatcttcgagataccctggagcaagggcaataggatttcgactctggcttcggagccgaggcgatcaataccttgctgagcatagatgagatcaaaatgtctgatcaattgtgatttttgctccttgaactgcttcaacaatgctgccacaggcagctgaatagagggggctttgactcgggtgttgacatgctgacagaccgagatgattttgttgcgcacctccacgctatctgacccaagcttcagcaacaagggaggcagatatgttccaagcagtgactgcagcttctcatctgtatctgccatggcaattctaaattccaccttgcctatcagactcaactcgcgagcctcaggactctgtgagtccgccatgataaaagtgttgtagaagggtgattccaacaaggcatcaaattgacacgatagaaaaaacaccaagacgatcagatttataaatcaatcaatgatataggcaaccgcactcacgtcatgtccattcaagtgaacagtatggggggcgctccattgattagtcatgatttgattagtcattttccttggcagccgctcgggcatctatatctggcaggtgcgatactaaacgaagtcaacatgaatgagtcaacaataaattcatgtagctacatacgtatataagagaagaaaaagagggactagataagcaggtgaatattaagtctatatggcaacaaaacctagtatgttctaaatcaaagtgggagtctgtctctcaaatcctccattctttgatcagcagcttcgcctctcaagaaccgaccaatctccctttctgcctcagccgaagtactacagtcatccttccgcttgacattgccaaacagacattgccaaaggtcatccttcttcaccatctcacccacgtcgccgcgttgcatcaggtttgcgagagtggcatcttctagttccatcgagtttgcagattcaatagccgcttcagtaacattatcgccatcagcaggagatgtcaagagtgctgttttgacttgcttctctttctccatgatgtgggccaggcgtcgggttactgagatctcatagatggattcttccaccgtgccggagataaggtacatccatactgttgttggtctattttggccaatgcgatgcactcgagcaattgcctggagctcgatggcagtgttgatgagtggctcgcataaaaagacatgggttgcaacggtcaaattcagtccggatgattgtgctttgccatgcaaacaaaagcactcaatctagattataaatagtcagcgtactgcgtccaatgagggatggccgaggttgcttacagccgggtctgatttgaatttctcaatgccacccggagagtcaatactggtgctgactattccagagctttggaatacgctttgtaacctcgacaagaaattcccgtattgagagaaaatgaccgattttgcgccagggtcgtgttcccgcagccataggatgtgttgagctaaagtgtccatctttgtcccgtaagattcctccaactcaattttcttgatctcattgagatggccggagctgatgtcactgtagatcgcattctcggaatgaccctcatggtctaattcgacaaatgtcttttcctcttgtacaactagctcctgtggcttgtaggtgatctgatggagatcattacgcaccaatttcctcttgcacatcgggcaatttttgtgttgagcccaccatagtcgcaagcagatagtacagtatttgtgaccgcacacagtcaacacacctgcaccaaaaggtcagtctgcgtgtgaatttaaatccagacaatactcaccaacttcgaaggtcgattggcagataatgcattctcgaacattactgtcagagctagcatcatctcttaggtgaaggagatatcttgctttagacttgagagaagcaatatttgcttcgataataccctcttgctccaacatcagggtaaaagaagattcatctagcggcttgcctgcactttcctcatcgtatggggccaccgtatctgaaatctgctgcatgtgacgataatactccagtcgattgttcatggtatcgcggaaagttgcaatttctctactcattttgaccgatactttcagttgctcagcgatcatttgaccggcgtttttcagaaccatttcgacgatcttatgttcagcacgagcacgcgaattgcccgaagtggcttgccactccagcgatgttataagtttgcgaagctcactgacaataccgcggagcgatccaagatcaggatcaggcataagctgactgcgagtttccatgatcttcagaaatagttgcggagagggcccctcacctcgttgggcctggacgattccggctttggtttcgtgggaaatgagagtattcttttgaccagtgagagcgtcatgacggtcgctgtacattgacctcaaagcctccatgtagacgtacatctcatcttgatgtcttgttgaccgctcatactcatcaccctctagctttgcatcttcttcctggtcaataagcgcctgagagaccagtccgaccatgacatctcgccatttcttgtattgctcagcatgcttgttaagagcgtcacaaagatcttcaaatttggtgagcagattgtatgactcgattcctttgctgtagagatggggaaccattttcgggatgatcacaaatttcttgtctcgtgccttaatcttgatttctttcatgtagcgctcgactttccgggagatatcagtcaacatctctttccgaatggcttttgcagcctcataggactcatcttcaagtttctcaagcgctctaaactcatccgaatctggctgtgttaaatttgtatcgctcttgatttggtaatatgcgttcgcagtgaagaacactgcaatatgctggacctcgagtgcagctcgaagcttcagtcgacactgaccgaggcggctgttcttgtctgcctcttcgtcctcttcgtcctcatcctcatcctgaatatcctggtctttgtcgtcggcagcgcctttggtcttcactaggcgcagttgctctctgctgtcttcaactagccgagtggcatagttcaatacttcctgccaaatgacgagggcttcttggcggcgttttgcattttctagaagctggcctcgtcgaagctgagataacaggagcgatcgttcttccgtacgtatagctgcctcgttggcctcagtcatggcttccagaacgtgagccacagttcgcaaagagccggagcctaacattcgatgttgaggcagaaaaacgtcaggatagaggcacgattggcggagtcttgttagccaggtacgcattttttcgacaactacagggtcttcggggtcccaattgcctccaaggggggctcccgaggcgtccaaaccgcattcttcacacattttctcaaaaagctgaccgtacctctgttcttctacagctggaaatggagtagtgatcacaatgcgcttttgaggtggtaggcgaatctcatccaatagctgacctttgctatgccgaagagcgattgtgttgatgatttttgccaagactggcccgaaaaacagacacaaccgtttccacaaaggggcggagaagcagaaaggctcataatgaagaaagattaagagaccaaacaggtcgtctatgtctctgcgcagtggggtaccagtcacaacccaagcattctctcgagggatcaagcgagctactttcgctgcattgctgactccactctcaatcatctgagcctcatccagacatacacgccaccatgagaggcgaatgaggggtgtcctcctctgttcaaatcgcttttcgtgccgtagagctcgctgtggagcttcattcgcatagtaaatttctttcgcgatgacattgtaggtggtcagaacaacatcggacttggcaagctctttgaccatcatatcgtcagttgcttctctccaatgcttgatgccagtgtaatgatgaacacgaagagtgggagcatgatctttcaactcttgtttccattgttcaagaatcgcgggtggtgtgatgatcaaagtggcaccaatatgtttcaacccgccgggatcagcttcgacatgttcttctcgcttattcagacttatcaacgcaatcacttcgactgttttgcccagccccatttcctctgccagtattccgcctttcagattatctgcggcatcgcgccactcggaaagatccgttgtcagaaccatgaaaagatgactgaagtagtagacctgtccatcggcatctcttgtggaattgaaagacactggcaggtcactttttggacgttctctaacgggaattatttcaccgtttggcccgacttctcttccttctctttgtaaaagccagcgaacagctcttctctggaatgggaatagcttgcatttcaaatcagggcatatgatattagtcgaactttccgtagccttgggaacgtgaacattcttgtagaattctcggggagaccatttttggacggttccgagcatttcatcgcgtgatttgcgcaggtctgtcaacacagacgggcgaacacatttttcctgcagcacatatcttgtaaaggcttccaggtctgctttccccaagcggttcaaacccggtgctttaatagaatccctccaaagaacaaccgtttcgagagtaaagcttgctccatctggtaaggcacgtaggtgcgcctggtagcaggaagtaggtacatctttgaagaactgatccacgtgagcaagtttgctggcggcctgaagttccctgaggagatcaaatagcctcaaatccttgcacggatataatagcaatttttcttcatcgagactagatagttccagctccatataattgggaccgccatcggccgactctggctgtggcgtagtgtccagatcttcatcgagaaactgaacgcttcgaacatttatgagtattggaacgcgggaggtggagaaatttggggcatgaggccttttgtattcgtgcctgctgggtttctgcagagggtaacggattagttgttttgcttcagagcgggatgtggcaaactactatgcagattgtcaaccgtgctaatggaatgtagcccagaggtactcctgtcattgacaccccattttcttgtgtcagactccttgggccgccccgcttggtcgtcttgcgccgcttggtgggacggtcatcgcattgctggaagagggggtatagagactcgagagtcgcgtctagaataacaatatgtcagtgctttgatttcgtcaagacaaccaggaaacatgattgatacctggtagtgtgatatcttctgcaacgacactcattttgaagacacagcctatcctgtcgccacaatgaagcgttgacaagaagagagaactttacatatgtatcggataatgcctggcacttgagacctttccccttccattttagtgctcacctcttgccgctttttgatcactgagtaaaactgagcacgtctctgagtatcccgacttgatcacgagccattacataatcaactgatctgctcactgagcatcacctgatcatcccgtgagcaccctgatccactcactggtcatcatctgagcactgtgatttgatcactgagtgctcaccgaccgacagctggtcgaatgtaacattcgaccagctgtaagcccagtgctcactgagtgttgtcgcgccggcgacctaagccttcctcagtcggacacttgcacctgcctcattcctcgaggaaagagcacccggtacacctggccacaacagctcccaccccgtaagtactaacactcttacaaaacaccacttctacagagcaccgctgacagaaacatgagcgatccagacgcagaccgcgccgctatgccgcggccaccatcccccgtgagagaccgccagcgccgcgagccccgctcgcccaaaactccccaaacccctactagggcgatttcattgccagcatcggagtcgtcaagatccgcttcacaagcctggagtcacagttctggcgtactctcggccgccactaaactggagctcattcgaatttcaggaaaaaactgttgggcctgcaccacggccgacccccaagcctgccatgtgttgggaaaaagagacacccaagtgagtgtcgctggcactaactactcgagtagtatgtggctaaaaattactgtgtaggacaacctctgggcccacttgggccttatcaactattccctcaggtcattatcaaacgcgattctgctctgtgcctcgtgtcatggacaatttgatagagataatgacccgggtttccttcttgttccgactgacttggatttctttatcgaatttgagaaagccgacagaatccgaagacaggcgggtagatggcctcccggccgacaaatgccaacaagtggcatgtacaaagaatacctcgagagctcgggcaagggggatgcggggtataccccaatgtttctgaaacattacctacttgcagggtctggagtgacccctgaaatgctccgattgacagcacccaagtactggcaaggggcaccggccgcagcactgcggcgctgcatcatggccctcgggagtggcagaatcgtggctctcggccaccaagttacacaacttgagacgctgagaaatctttatttctctcccattgaaggagcgtcggcaatcaatgtccatagttgcgatctggagccccagctagaccctccacagttccaagatcaaccggcccaaaaccctgatttggaagaacccaaatccgaaccagactccgaagaccaagactctgaccccgagtccgaccatgatacatacgggccccactcaaaagagccggatttcaatccaaacagacagcatgataaccggaagcggcagggaaagggtaggaaccagcagggctctaggaaacaggcgaagcatgcaccaggtgcgaccagacatgctaccggggagaattgggccttaggccccagcgcaacaacgcaggatgccatattgcgctattctccaatcttcgcccgcggatagagccatccgcctccctcctccctcccaatgtcatccgcctctcactgccatccgcctcccaatgtcatctgcgcacctaatgtcatccgcagcccactgtcatccacctcccactgtcaaccgtctcccactggtatacgcagcccctgttatccatatcacaatgtcatccgcagcccactgtcatcctactcccactattatctgcagtcaatgtcatccgcagcccactgttatccgtatcacaatattatccgcagtctatgttgtccgcagcccatgttatccgcagcctatgttatccagacggatttctgacttgctttttgctagttgatctcatgggaatgagtatgagcaatggtcaggcttcaaattgaatttgtttcggggcagactagtgtctaccccgcactttttgcaagtggagaacatgtaacttagtaaattatactacagtctcacagcaaaagttttagcaacactgacaatgtcttcaacccggatcggcccgcgaaggaccctggccccacctagataccgccttcctatttaacctacaccgccatacgatacgcggtataggctccattccatatagcgcgtatatctcgcgtttctctctctaattccttgcttgatactggtagcaacagcgcagcaggcatgagataaattggagctacggcacttagagcatctctctgagacaatgccacaccgggtggaggctatcatcgagagccaggggtggtatacagcatattagattccatagtatgaatttatggaggttttagaccggcagtaacttacataatcaagggggtgtggggccaggcgttgttaacacttttgcgtagtcactgtaattggaaccctaaaccactgtatcgccgtcggatcggaactgaccgatacgaaggtcaagcagctgaggccgtcgcgttgataactccctctttcattcctgtgttgtaaattaggaacaagctcaccagttcggaggatagtatcacgggctgctgcccgaagtgaagagagatcaggttatggtgtatacttctgtggtaacttccctctgttccttttgaagaagactaatcagaagccctatatctagcctgttccgctttgtatataatgttgtaaagtaatgattcgtgtggttactagctgagccgttagaacaacgaacgaatggcaattcctctcctactacattctagttattagaggctatatattagtaaagatatagtaaaaagaataagaacgaatttacttacctggtggttgaattttccgtagaccatttcgcaggtagcgtctgcttttttacaagcttttctctccaaaaatttctgtcgaagagcatcgtagaaactaaatagttgttagctactaataaaatattagtaaaataggtcgcatacgctaccgcttcacgttagggttgcgaatattggtatgactgtcgagcatccctctttatagagaacatacgccctacaagctcttcattaacctctgtatgggagaggttacggagatagtcgttaagatgaacacagtgcttcatgccggaatagtaagatgctgtcttcgtgacttggcaaccaaggaaggagcagtaaatatcactttttccgccatcacgcctactagcgtactggacctagtaaaatagttaataactagtataatatcgatgattatataacaacttactagattaagtgcatttttcttctcttatgaagagagatgtcggagattaaccacatatgcatagcctttcggatgagtacgcggatattctggaaggagaggtacatattcaatctctgtagtagatattgcgtcgtgggtagcttctgttaggggagttggttcatcttccgttccctatttgaaaaatattagtaacaaaccagtaggaaactagtaaatttcttcaaaaacatacctcgtattcgttgcgctcatgcaggatccgatcatcggatgcattgtaaagctcgacatctgcctctgcaggctcgtctggttcaggaataggctcggcctttataagctcttcaagcttatgatagcggtgtttccaccaggtagattgataatgcgccatggtaactactagtaaacgaattggaacaatggtttgtaagtagttatacgtgcatatccaaagatatatatattcgatgtagagttatttatcagtaattaggtagtaaacaactagtaaataactagtatacaagaatgtatcccttgtaaatataccacatatttcataccaaaacgggatgatctaatcaaagataccgtacatttccagaccaaacagcatttacataagcctaaactaggggtatcaacgtgagcattgaccgcctgaccaacgtgaggtctcaggcgggcccacatgacctggtctctcccggacgatacctgaggcggaagacacctgaggcatgcggaaggatgcggccggattatataagagacggctgtgtatgatcacatgatccataaccttattagaggccggaaactccattcatacttagattcctcaagtatcttaataacagcattattccttatcgatatcattatgactttagtattagacctttatatttaagatacttcctctatgttggtaatttgaggggtggtgcctctaaattatcgtattataagtacaggcccgttcaacacagcgctgtacggtaagattggaagaaggcttggcatttattcggctgaaatgcaggaactcctcaggagatcgcatgatcgagatcaagatcggccacgtttcccctcttccataaattaatagatcagattgcacctttattatacgcaatcttcctcgcttagagattgtattgttacattcctttatgctaatctcttgttattacgttattgatgttgtttgttattaactattattgtaacattgttattaatgctcaatttgagcctcgattgcttaaatactttggaagccaatttcgaatgttgctgtatcattgcagacctggtcctcctagaagcaagcggtcctcccttgtgtccaatggattatggatctctattccagtctcactaaccttcaaagttcaggctcagtttcaacagctatgctatgggctacataatcgtccttgcatttctgatagatttccttgatacagtgataaggtgcacttcagtatagtatatatacgttatacaaattttaaagcactggaattcattttgttttattaataatagtaatggcagtttttactagacgatacggtttctgcctaatgaaaaaaaaaaaaaaaaccataacaaataaacagacgagtgcattcctcgggattatacctgggggtgtgttggatatggtggtcacctgaccatcagcccggtacggcaggcaccaacccccataactagatagttaggcattctgccctttaggaattgacaactctctccctcttcaatcgcatcactacactgtagtcgcatcagtatataatccagtagtatcctggactccggtagtaggcttgagtgaatacagaccggcgcgtgttgacggagtcacgatggaacctatggtctctgtggccatggcaagaggactaaacccagcggctacagcgaccgcagagccagtggatgaggccccgggagtctgcttagtattagcacaaaagaatggcatctttatcctctatcttcccaacatacggcgacagagtctgaccaccgtgagcagaccaaccgggcatcatcatggtcattttcataccagcaaattcctagaacaacgtcaatccaataaacttccttattaaaccgaacatatactaacagtcatgttagcctttcccaaaataatcaagccagcatcaatcagccgctgagtgatagctccgttctttgacgccttggctcctacgaacgcatatgacccagctgtggtgctcatgccaagctccgatgctgtgacaaagcaatctttcagaactatgggaattccatgaaaaggaccccaggtttgtctggcgctcctcatcacgagccttggcggttgcgaggactttgtcccgtggggcaggagagattagcgcattgagtgcaggctcatagcgatctatttgtgccaaatactcttccacgtcctgagcgctcgtggtcttgttctcatcgagtaggcgctgcaggtcgaccgcattggtcgtgaggacgttgatggtcatttctgcgctggaacttgagattcaggtaaggggcaaattttgttactagtgcctttgttggtgatattaattgtagcatcgtgtgagtacgtatatatagatcctgctgcctgattgcggagcgaagcgaagcaattatatcgcattatttattctggtagccttaagggtagttactgataacatattgatacttcgagattaccgaaacgttcacccgttgtcaccgatggaggcaacatctttgtatcaaagccgctcgagaaagcaactcatctagctcccacattgtagcttgcaactgtgtggatagcaagtggtgaaacttagtggctaaagtaggacacacagcaattgatcaagtcccaggcaccagaaatgggactggaattttctttcaacatactagtagggatctttcgatctggttgcagttcggttgatctgaggcgctggccccgcacgggagcccgatggacgacaacttgaggatcgttgaatttacattaactagttaattgagtatcattgacagactacacatagaatatgaggacctgtagaattgacgacgaaaatgaccgctttcaacgctagaaaaggatacgattgtcacgccgcttgaccaaaaatttctctcgtgtctgatcagatatataagaccttttgatgcctagagtcagtgccaatacaaccaaatcaggaaataataggatatttgagcaggtacagatgaaaggaagttgaatatagactcgaaaattagcccgctacgtaactgcatacatggagcaaccaactaggaactcgcctagatattattccgtaaattggcgaatccaaaaccagaatatgcagtcacaattagataagaatcttgaaaatatgttactattcctgtctatgaaccataataaccggttggggcagtaatgagtatgacgattaagaatgacgtcgtgctatgttagacagcgttcaacctcaacataaatagtgcctgtttccggcgatatagaacttttcctatactcagcaaaccaagcaaaacttactacaatcttaaaccaatttttatcttctaatcttctatcttcaatatggataccgtcaaggttggtggattttctcacacctaccctaacacaaactcacatggatacagaacgccgccaactatgttgccgagaccgtgcagggaactggcgctgaggcttccaaggagaccaacaagcaagtcgcaaaggatgacgatgccaagctgagcactcgtgccgccgctgcgaaggatgctcttgtcgacaagaaggatgagaagtctcacgatgttaaggccgatgttcacaagggtaagttcatacacctgatacctccatagtcagttacttacaattttgcagaacaagttaagcatcaaaactaagggatattgtttggtatgggtcgatgttacagtaccaattgctctcccctaatcccgcgggtcgggtacgaggcatatgttcatagtactagtagaagaatacgcttgtttttgagtggaggatgctgttccgccaatcacattaaatgaataccctacttatttcatttcaacgaattggtgctttaataggtgctttaataaccggctgcaagttattttcttgcccgaacttcagctttcaccactataggatttatactatttgtactatgtgtctatacttatttattctactgatagcttggaaagcatggttgaagatgcatgtcggcagttgatcgtttaccaatataattctcttcaaacagtcttcacacaatatatttctatatgttgcgggcttattgctcgcgtctgaaaatctatatcgatgatacctattctgaattcggcttattatttcgcgagtgaaactcacgttcctaggattatatccggcccaaggatctatagtatggtttctaggcacgctcttggtcgttcctaggaatcggactcgtagtatttctagaatgtacgatcattatatcgcacatctcaaaagatcgatcgattagtggtcatctggacaagtaggatagcttatgacgtaatgtctataacggcctttcagtatcccttggcagtgatatggttcgatgacatcatggaaaaattcgatctaccgccaagagccatcgggctgtagaaactcccattggacactgccttggaaatcaccctcgggctctcttgctgtgtaccgaatttgatattatttctaaccccttgagaaagatgttctcctccaaacgcctgaccgctggattttcactatggccgcgtccgaaggtgctgctgtccagtcacactatagattggcccaggaacgggaattctacaagtaagacctttttcatcctggatcgcgtccccttgtcctccacaggtgatacagatactgactgatatggcattggggcagatatgttccgcgcgaactttccgcatcgcattatgccccctttgatcatgccagcgagaaaacgttcatcccgcaaccgtcgcgggattcggccatgacctccttcgcccagctaggcgtcatgcgtctaggcacccgacgagccatgatttctctattcgataaaacccaccaacatgtcgttgcagaggcaactcggacattgggactaatcggtgggagaatccgagacgaacacgaccggcttcggctaggttgctgtgtgctcccgaaagagaggggcatttgccagcacgtcgaagatttaccctctaaggaatattcagaagccggcgaggtcctcgaatctcgttcgctggttattttggatatgacgcaggacgaacggttcaggtcaagtcaactgccgcacgcgttgtctgatgtgcgcttctatgctgcagtgcctatcgtgagccctaaagggttcacgattggtgcctacagtgtgatggaccacgagccaaggacctcgggtcccgatcaacatgatctgcagtttatgaaggacatggctgcaacgatcatggaacacctggccatggatcactccactcgcaaaagtcgccaggcggaacggatgatcctcggactgggaagtttcgttgagggcaggtcgacgcttcgcggatcgtggcgagaagccaatgcacagtatgtcgcctccgaacagtccggggagaccaccgagggtcaattgaatattcagcaacagaatctgcaacaggtcgccaaggaaaagattgagaaggaccttgtcatccgccagcattctagggttcctaccaatgattccgcatcgaaaagtgatagcaatactagaggcagacaacagccgagtgtagaggtcaacaaagcggatgggtcggttcgaagcgtccttgcgggcgaaagtctacaggatgactctcttccgaccggcatcaaacacgttttctcgcgcgcggccaacttgatcagggagtcgattggagctgagggagtcatgttcctcgatgcgaatagcaaccgttttgggagtctcgtcaaacatagccggaaggtttctggccccagcttaaaaagtccgacatcgagtagtgacgaaagtaccgattctgcgtcttctcaacgcaactataccaagggtaaccagaagggtgagaagaacaggaatcttgtgtctgaatgcatgggcttttcgagctcgagggtgtcgagcataaacgaccagatgagggccggtcaagcagttgtggttccagagcctctgttcagctcgttgatccggcgatacccccacggtaaaatcttcacttacaacgccaatggaatggtttccgaagatagcgatccctcatggaatctgtccgagcctgatcacgtcccgacttccggggcgcctcgctccaaagaccgatccctcgccagtaaacggcgacgcaagccaacattccaacaagatgccaatagtctgataaaaatcttcggtgatgccagaaatattttgcttctacccatatgggactcggaaagaaaccgatggtatgccggaacactagtgtggacgaacgatccggagcgcgttttcaccattgaaaatgagctcgtgtacatctctgcttttgttaatagtatcatggccgaaattcgtcgactcgacgtggaggtggcggacaaggctaaaaccaaccttgtcagcagcatcacccacgagcttcggaatccactgcatggaatactgggcacggcagacattctgagtgacaccgccatgaatgctctgcagcatggtatggtccataccatagagtcgtgtggtcgcaccctccttgataccatcaacagtctgcttgatctcacgttcatcgacaagtatcagaagaaacggtctcgcatgagtgggaagccgggagagaatcaatcgagtttaccggccacttcgaccaaggagggtcgcatgcaaagcaaagaccgtggcgagaatatttctttctcccacgtcaaactggacgcgattctcgaggaggtcacggagtgtgtgttcgctggatacagcttttacaatcatcccgaggcgccgcctccagccttggccaatctttcttcgcggtgggctggtccagcgagcacgtcggatcaggttggccctcgagctagccaagtcacgatcattttcgacatccagccagatacagaatgggacttctggacacatgctggtgcttggcgtcgcatactgatgaatgttttcggtaatgcgctcaagtacacaccctcaggctacatctaccttgggttgaagtcatcccagagggacacagagtctggtggagaagtgccgaatgatcaaggagaggaatttgaggttactcttacagtgaaggacactgggaagggtattgggcccgaatatttgcaaagcgaccttttcactccgtttcaacaagaggattcgcttgcgtctgggagcggactaggactgagcattgttcgccaggctgttggattgctcggcggctcaatcgaaattgaatccacaaagggagttggcactcagctctcgattcggacaccactcaccccgtcatctggtccagacacttcgtcaaccggctctacgtttagttcaccacggaaacatactcagggcaaaacaatcggactcctagggttcgggtcatctctccgctctcaacgagacatcgtcttgtactcatctttggagcggctgtgtcgggactggtttgatatggaggtgacaagcgtatcgtccctagagggcgaaaacgtctcctttgacttttacttggctgtgcagacggaattagactctgagcatgttgaaggaagaaacctgttcaattttaaaccaggtctcaccaacggggatggtcgcagctcaccggttgtggtaatttgtcaatcacccgaggaagcacacagaatgttcgttgcagccaagaaccggggcgaaacgcctctcttcgagtttattagccagccatgtggaccccggaaactggctcgggcattggatatttgtatcaaacgacaactcgaccaacaatctggccggcctaatactgatgagccgactcgctgggtagaaatgcctgagtcctcatatctaccattagacattgcagctagtgacccacccaaagataggatgaagatcggtaagcgaccaacaacggagacgatgcgcagtccagaaagtcggatttctcgatccccgtctcacaagggaaatttggaagacgatgcacatgccgcccagccgacctcgccttctaagatagaggcggaaccagagacccccggaccatccgtccttctggttgatgataatcatgtgaacctccaattgctttgtgcctacacaaagaaggacaattatcattacatgacagccaagaatggggaagaggcagttgaagtatataaagcacaccacgggaagtttcgggttgttgtcattggtatgttcaaagttcgaacttttctttcctggatttggtttgatgctgatcaattagacatctcaatgccagtcatggatggccttgaagcgtcccgacaaatacgtcgcttagagaaaggctatcgagccaagatgaccgaatcggaacaacaaacaacgccccccacagtcatcgccgctttgactgggctcgacagtattgaagcccagaaggaggcatttggttctggcgtcgacactttccttgttaagccagtcaagcgccgagatttgcaggccattctacggcgaatgaacgtagagtgagctaattagcaccactttattttgtgttgtcctcacttaactgcttgaggcccggggcctcgatgaaaatacaggctgttatctcaagccgagggaaaaggtattacactagcagacaccctttcggaaggataattctaatggagtagtctagcttatccctctatgaagcgaaatccgattctgccaggtcaagagtggctagacgtttacgaagatctccacattccgcaaaggcctcgatcattcatctcggtaccgactttctcagcattctagatacctacccagagtttatcaagattttacagcaactggtcagttattctttctctaccaattccaattcgaacacaacttcgaatttccacaaccataacaacctagaacgtctgtatagatctcaccgtcggttcaatcaacctagaccaagcaccccttgaagctagtgacgacgacgatagattcgattacgaccctatcgtcagtctctcagtatctagagagatagaatagaaaagtaagagaaagtgaggaagagcagcgaagtaggttattggggcgctaacccaaaaaaggcaacactaacttgaaaaggcaattcacaggtccgccgtttagttacatggtcaatttgatactaacaagattagattagcgcgaaatattccctcacaaaagaagcgtaatatctccgagaaagagatgaccactcagattacaataagagagacctcaaagagccgtaaccctctcatcctggcaaaacgggcatgcagtgaagtactctgccatgtccacctggatctgccatttcgcaaagcaagacaaacaagagaaagactggacgatacggacccttgtggatgcagactggggcaaccacctctgcgagagaaggacgagatcggtagcaaggccgggggcttcttcaagcagtttctcgaatcccttcttctcgcgcagctccctccggtgtatctgacaaaccgctactaccacatcccgaagacctcgatccaactttggtgttgttttgtatgcctggaaagcagcaaccaagaattcaaccgagtcccagtgatcttgagcgagagtgacgaatgttagctttgcttgaactttgagatattccacctcgaatttgtcggcaatggagtatactttgacgttgaacaacaggggacacatttggtgctcgggttcgttgatgtcgtagtgtagtccgtagaaggagcgtatcatggcttccacgacgcgtggatgctcgtcctttatttcgaatacatgagcatcctcgtcgctctcctgtatcattaaagtcagctgggcgcgtggataatgaagggcttgggctttggaaacatacactggagagatcagcgaaatgtctgcagaaagtctcagatctgctgcagactacgattcggtgcacgctcaaaacttggtcagcggtgtagattgtgagatcggagaagatgcctgtacggtggaaactgtcttctgtcagttccctcattcatacaatgtgtagactcaagaacttactttccaagtcgatggacaaaccgatcagtgccctcgacgctgttggaagtgagttccatcgcgaaggcgtgttgtggctagctttgatgcgaaaggaacgcgaagggaaatatgtgaagaggaaaggtaacgttggaaggattcagacctttttgggtaacaacgataagtggtgtagcttttgagcctcagcttgcaaccttcaaaaggcaggcacagcttgttactgtatctagtttagacatatagtaactaaaccctacgcgtcttcggctacggagatttacacccctcatgtattccgtgggacttgtcaaatggcaatgagagccacgacttcagaaacgtccacgagaaagtccggttttgttgtttaatgcagacctacatggacctcatacatatggtaatgtcatggtccctgtggtaggtgaagcagcatatgctacggcaccctctgcctgcgctgtctcttgagctacggtgaaatggtggtcagagagatggggaggagagaagaagaagagaagaagagaaatggggggaggaccccttttataccccaaacccacgtgccttcctcgagtgcgacaggtccctcgcatcttcctgtcaatggcacatggcaccttccagtttacattgtttgccttttttgtttatacggggaacttccaaggtgtaggaaggagccatgaagccaatatcacattatgctaattccttgtagtgcaattttaagtaaacactatagctgagaatgcaccttcatattatgccattttctctagtttacaagagctccaggtccctttccaagtatcgccctcacactgtctctcccagtatccctatgatcttgtggagaagaagccgaggtcttgctatcagggtcggtgtcatatacaacggtaccattgactgcatgaacagatcgatagtatgaccgcccattcatctcaccttcgaagacattgctggtgtcaccccaagagcttgagtttccaccagtgacggatttatactgcgccgtgccagattgacttgtgtgtaggtatgatggccccgaggtcaaggtgtaagtagaaataccgagacctcctgttgcctcgtaatcaagacccctcttcatccaagagtcaatcgtcatcccactcgaggtgatgccataagttgcattgacagccagggggtactgaaacgcaatgctgtttgagatgggtgtgtctccgagctcggtaatggtattattgccagttgtaatttgtctgttaaattgactgtatccttgctggttgaggagaccgtggttggagaaggatagtgtctgtgaccacgagtacagagaagaggatgctctgaaaactcgctcgacaaccacagagtacgacaaggaatcatttccgccggtctcattgtagataagattccgagtcacagcaaacataggcaagggagcatccaccgtaggtccatttttgtcaagagtggcatttcccttagaggctgagctgtcgtcatcgatatatatgaagatatttcctgtgacaacccaatatgagccgacagtgttggcaaatgtggccttcccatctgccgagacatccagaccagtcacccggatctcaaacgagtgctgctttccgtcttgaatcatggggagaaatggggaaatatcaatctccggctgtcgaagatcaaatgcatcagtgccaacaaccggacgccagaatcccggagccacgcctcccgtaaagataatagggaatggccagacaaggccggcaaggatcccatcgatatagagctgaacttcacgaaaaggagtgtacccatatagcccaccgacagtgctttcaaagtcttgggtatcttcagaaaagacattggaccaccagaactcttcttctgattgtccacatgccgatattgacacaacagcacgcgatgccgcagcagggatctcgtacatgactgttgtgttgtctgtgggaagctggaatgcacttggagagtttgatgccgactttttggccgagattggaagaatcatatccgcagttttgacattgtgttctccagagaagtgcgcggttagcgtggcattgaacgaaccggtataaatgtcgttgatgatatttcccaagtcaaatatcagcttctggggactcttccatagtgaattatactgtgacatctctttgacataagtccagacgatcccattgattgtcggctctgccgttgaagtccggaacacttcattgtctccgaggtacatgagtgccaggcggtcaaattgcttcccccgggaggtgactgtgagattgattcgtacagtatcaaagtcgcagtttggaggctcatagtcgcctaaatagttgcaatattagactacaagtagaagtaactctcgagacctcttaccaacaaacggtgctccataactggctccaaaaacatgatccatgagcaatatgtcgacatcgcagttgccgtttccactggaatcgagcgatattggctgatatagctggaaaaactcctgcaaaccagtagagctaggtgcctgcgatgaaacgccagcaatggactgtaatccgcttcggagcgaggaagccgatgggagatgccccaaaagcaacaacccacatatggcgaacagaaccataataactagtaatccaaagcttggattttctcttcgcaatttgctgcgggtgtcgtctacccttatttctaaatcgtggtggtcaatagaccgcacagtgtccgcagttgtgtaagcttcttggggcttcaatgcttcttgactgagtaccgacctgcgatgcgatttgaaaacattgaaaaatgcgaccgcaatgcagaaaagaataataaataacaaccatgcagctagctgcgtaaaacaatactccattgggaattgggggtccgttggcggttgaaacgagtgccctggaggaactagcatgttagctccgcccgtgtgagccagttaggatattagattctatccaagatggtgccaggctaaaggctatgtaaccttggaagtgactcttgcgatgcaatatatgaaggatgacgttgctgaagataagatgcataaagaggggaaggtgcggcggagttccgacgcaagcccagggctagctatgtaaccctaatatcactattcatacggagtaatgaacggttatcagtccgaatattgatagacctcaatgcttcgaccttgactgttaatgtcatggatatttctcgggaggtaaagtcttcaagaaagttgtattttgcaacaagataacattattggctaatttgacagctgtcacttaggtagaccattgtggtcatttttgagttgagcaaataccaatctcggcacagcagtctatgggaagctatatagatgaaaataattgaatccaaccccaagaatgacagaatctggccgcccaccaggcaccaatcacatatgtgtacggctttggggcattcaacttctggtccatcaacacccgccactggggccctcagatgcggagagaaaggatggccgagataccttgaaaaacgcgatcggagcaatcatagtgcacatccatccattgccgatcgcattgagcatgggttgagtgacgacggctctagtgcatgcaaggatatttcgcacaaaatttgccacagcaacaccgctagatgctttcttgggagtgaactccgtcagagcggtctgcacagtgcccatgacaagcatcatgccgagcccgaagcagatagaggcgacacaagggaccgcccactgcacacccttttcagcggaccagccgtaccaaatcaacgaggctggatacagtgtcaaagccagccagatattctctctcatccggtcctcgggaaagtacttgatcatgctgttatcatcgtagcgattgggcttggttggctcacgaaccatgatgtggttgatccagcgaccaccaaaagttgacgagatagcgtactcgattgtcggtgctaaatacacaagacccacctccaaaatgctgaaattgtagagggccttgccgaagacggagacatccatgatgtacatggtaaagaaggcgatgacgccagaccaaattacgacgatgacgggctggaagcggagcagggccaatgccttgaacgggccaaagatggacatgaatattttgacgaaaatgctggtgctcttctgcttttcggtctacggctttggctcacgctttgcgatcgtctccggcaaacacaggaaaatgaacttcagcatcacaccgccaaagatggcgagaaaccagagggtacttcgccagccgagaccctgatttaaagcaccaccgatcacgggcgccagaccgtgcccgcagagagggcccagttggaagactcccatagctttggctcgtgctttcggatcccagatatcggcgacggttcccacgcccacggattggacggaagctgcggctccaccgctgagcactcggaaaacgatcaacattgtgacgttgacactgacggcactgatgcaggagaaagtcaagaagagaaaaaatgagaggagataggtcgttcgccgtccatgcttctcggacagtgcggacctatacttcgtggttaacaagggtagctctcatttctcaatttgcaggtctacttaccaccagataggagtgaaagccatggcgagcaagtagagtgccaccgacaagtttgcaaccgtcggagtcgtatcgaggtcatacgctacctcggccccgctgtgattttatcaatgggtaatcatccacaaggaaacaagcaatagcacccacggaagaagatagaggagcccgtggaggaagtaatggcagcgaagctgacagtcacagtcatcgcccatttggttccattcccatattcacgcgggttggtgatttcaggaataacggagaatccgcccagcaggcctcgccgccccgagcgagggacaacaacaatctctggtcctatagtgctcgctattggttccactttccctggagacttgatgggctgagtgggcggagactctgtggcagacatttcaaaatcgcggttgaggttgagattgttgatggccacgccatggtccttctcgtcactcggcattcttccggtcaaaagtggaaattggtgaatagtagagctgggcggatgccacgatgcttatacccaggcacattgtgtatacgggttcttcggggagataggtcatttcccaggacagtaaagccgagcaagaaaatgccggggtggacacaggccagacgattttagaccattgaagaatgtgaccatgatgtactccatgaacgggagaaagccaaagaaaagaaacgaggacgtttgatgtccgggcgccgctacactagtgagcttggtgcgcctatcgccggggctgtgcagatcccttgggtactttaagtattccccggggccctccacgcggaaaatcaatacatttgaagtcgcgagaccgctaaacacgaattgtgtatatgatgacacatatttccagaaagggagaccgacaagacataggagggaaaatagttctgtggggatcaagatcgtactgatagataacaagcatcagtagctttctccatggagaattcggcccggagatactaaccagaaaatgccgagccgaccctgctgggtacaaaaggtgcctaacacgctcaatattgattgactctgagataacccgacacgatgtccgcttcacgccccacgatccttatcatcggtatttcacgtggccttggccacgccatggcggtcgaattcctagaaaagggatggaatgttgttgggacagtccgcggagagtcgcgaaaattactccacgagctagaagacaagtacaacggtctgattgacatcgagaccttggacatttgccaacccgatcaaatccaggcgctagacaagtgtttgtcgggaaagatattcgatatcctctttgtcaacgctggaacaacgaatcgtgaccaaacccaaaaaattggcgatgtatcaaccgaggagtttgtacatgtcatggttacgaatgcgctcagccccatgcgtgtcgttgaacgtctggcacatcacgtggctccgaaaggtcttattggtgtgatgtcctctggacagggaagcatcagcaacaatgaaaccggtcagcgagaggtatatcgtggcactaaagccgcgctgaacatgtacatgcgaagctttgcagctcgtcaggccccatcacgtccaatggtggtgatggctccagggtgggtcaaaaccgagctggggggtgcggacgctcggcttaccatcgaagaaagcattcccagcttggtcaatgtacttattgcaaagcaagaacgacccggactcgaatacctcgactacctcggccgaactgttccttggtgaaacataatcacgtggctatatgagccttcatttttgttttggccagagtctcccttttttctttcttgttccttctttagatgtagattctaaatcatatcaaccgtgtttctcgatcagtactcactagaacaccaatccattattgtacatctagataaatcaatataacactaatttaaaggctatacacagaaaagtcctctgacggtttatgctttttgtcggtcttatatatatccaagaagacatctacgaagagattcaaaaagacattcacaaagacgactacaagatacgttcaacatggcacggtatattccttatcattatcttgatcttgcatcaacccactattgacctttggtccttggaacgctctgagctcttgttttggaatctgagaattccgctggagtccgtataggctgccagagtagttctgtcgcctttttttcgagacagctcatcaaaacgcttagtgacgacacatctcttgtcatcacgcttgaggcagtctgcctccagacgagtttctacggcccactcgactgcgaagcgacgttctcgcgtcgtgggtacattgtactcttggtgtgtgctcatttagatgttcaacgtactctcagtgtgcactcagtgcgctctcgctgagattttcaaacttaatctcagtgtatgctcgttgagatgctcaatgtgccctcgacacatgatcattgtctgctcatcgagatgcccgcgaggcacgtggagacatggtaggtgtcgagcggagtgtccgaattggcgcaagcagaccttttaccaaggactcagcatgatcgtgggtttcttgatctgattgtaaacactggagatggcggacgaagttgactctgtcatctggcggaaggtgagtgtggaaggcttgcagaactcatacagtgttttcgttctgactgattggttggtagctgtctactttctccatcttgccagtggatgttgttcttagagagatgctgttcttagatccagagtcaactggaacccaaagatggtgaccggagctcaaatgggtggggctgcctatctgggtatagctcccgcattagttgcagatcatgtgatatataaaacattccgaatgcggccttatcacgtaacctttttttctattttggtcgtctctttggtcgtcttgtattggtagtcttcttaagtcttcttagaagtatgaaggcggtaaaaagcataagtgcttagcattgtctaaacctatatacagcaacatacatagtacggccagacgagtagagagtatagtgtaaaaaagaaagagaagttgtaagacatcaaatgtcctctgtaaagcaagctaaaaacaatcactccatatccaatgcagaccattgtaccaattcacataaacaagcgccaggcaccaagaataagggccgcggtaccggtacagacacccctagagagagaaagaaagtcagcataatctcgcgcggcaagatagttcggggatcatacatgagccactgcaacgtcgagaacttgacagcctcaactcgttcccttaatcctgcaacctcctgttcaattctcgtttcggtctccttgatacgcatttcctggctatttgcctcctcacggatccgacccttctcaaggttcagatccagccgaactgaagcttgtgttcgtccaatctcgtcccggagccgggagttgagtttggcgaggtctgccgcgatcttctcgtgcgatgaacgggtcaattgtgcctcggtcgagtctgcgttgagtagctccgagcgcagtttggcaaagtctactttttgtgtataagttgatctctccgagtctagcaaagcgtttctcgttagatctccggcaagcactataaacgatgcgcgacagagccgcgttcacataccttctcggaggaccattgtcctggtcagattctggattgactcttggatgatatcgttcaatacccgcatcattgctacggactgttcctcgctgaagccctccgcctgtaggcgcttcacgaatttcagggtatcgaagtgatgatcgcggtgctggactgctgtcgcatgaaaggcgcggcgagcaggatggtagctagccacatagaccccattgtgtcggattggattgccgcggtgaggtttgggcgttgccggcgtggttatagaggttccgcgggaaacaagatatccggagatgacatcccgggacgatgtggtgatgagccgggaagactcgaaaggtgggattagagaattaaattgtcgcttggaaggactccagccttggggaagtggtcgtctttgacttgtcgcaagcgcgggctggtgggtgatggtaatggatggacgcgaaggggagctgttccaactcaggcggggaaggatagtgcgcgggacatccgcgacatgtttttgagacgccatgtcaaggacagcgggccaacaagtatttgttcaacgagtgtactttaaaccgatcaagaatgacgcagaagagggaagcttggaagattccggggcttgaaatgtcgggatgactaaagacctcggaacgcttccagtttcccggcccattacccgcattgcctattttattgtggagtgaggtgtattctcatttcatgcaattgaggactatttttatcgaacttgactaaagcttctttcagaaaatatccaaatcagacttcacatgtaaacgctatcacaaatctatgccttttcggctactgtcaacctcttatctataagtcaaacagcttcttcatctgcttgatggtgtcgtcaggaccagtaacggcatgcccaatggtgcgagggtcctcgtagatctcataatcgtttcctccgacgcaagtcttgtcgccgaagaagtggatggtcttgtagtcgacacccgagatgcccttttcagcttcgacgtgctgtaggcagtaggtcttatcccaaccggtagggaagacatcgaaagagatctgaccgccgatagagtagctatattagtagattgattagtaccatattaaaagtaaaccttgccggacaaagacttacgtgagaccgtagtcggggaactccttcctcaaggcctccactagggtctttctgatgttgtgaatcttgtcgaaactatagcataggtcagtcaggcagtccatttatgtggacatatagaagatcagcccgtacgcttcgaactcagcacgctcgtcggtgctagcagcacgtccaacagggctaacattaaccattccattacggaactcaacgaaagtaccgcgcttgcgaggcaacttggtgttggcaataaatttaagaatgaaatccaccagtgtttggtacttgtcctccccaagccactggatgaagttgttggtagcaagcggcttgccgaggcggaatgcggtcaggccgttttcggagaagcagaaatcgaacatggtggtgacatccatggtggctgatccaagttgttcttgctgcttcacaaggttcgagccgccaacctacatcatgttaggaacggggtgggggtattgattgggaggagacgaacgtatccaatggcgcatttgtggcgcaaccgagagagcaactcgagcatctctggcgaggcatgctgtaatagaattcgttagtataattgaacaacaaggagtctcagtgcaacgtacccgtcttgcgggggtgagagtctcgtcaacatcgaacagaacaatcgtgttcttcatgggacggtcctccaacgaggggtaaacactggtagcttcagtcattttgaaggatttattcaattgagtctgcaaagaccaaaattgcgggttactcgggggtaaatatagagagaggggtccattttggccgcaagcggtgagtgaaggcggaagcttagttgggtccagaagcggaaggccacctggtctgtttcactgttttggagaaaccttggtcgattagagcaagtgactcagtcagatcattgatctaaatcatttccgtcctggagtacacgatgttgtacaggattgacagtgcgacctaaacccgtggactcttttaagcgcctgactgttatcgataagaaacggaggggtcaattatcagatctgaaggagtttggaaccttggaaacatccatgaatgtgcatttgagaatctctaactactggttacatacctgaggtatatatttcctactgtacagtacaagtgatatatagccaaatagacatacagagtcggaatgtccaacccaacccaatccccacagagacctgtaagagcccagctcccaaatccagatcccgaacacgcagaatgaagtatacatacttagcgtcccatagtggactggaagaccttagccgctagctcacccaggagccgcgtccgatcagtgttcggcaggtccaaaaaagcctcgtagacacttttgcccttagcatcgcggaccgcgccgagacgattacccgccacagcgccagccaacgcaccaggaaagttgccaacaatgaagcccatagcaccaccgctgacaccgccaaccagtgcccagaatcgcccggttgagccagttcggctgccgtctccctcctcggcgagaccctcctcgcgtagcatctcctcgaatacggagccaaactgactgttgtctcgttcatcacggtttccaccgaatccaaaatcggaccaggagaaaccaccggtgggtgggacatccgcttcctcctccgctgcccgggtagcgtcatattcccggcggcgtgtggggtctgatagggtgaagtaggcgtcgttgatttcttggaactttcgagtgcgttcgggtcgctctggcgagtcgacggggactcgatcggggtgggatttcagtgattccctgggattggttagaggggcatttcaaagctagttgtgatgcacttaccgcttatatgcacttcggatctgttgttgggtggcattctggacgatgcctaggattttgtctggtatgtgttagttgggtcttaattaggcacttggagatcttacaataatcgggagctggtcaagagttagtatatatttcggtaagagggagtgaattaacatacttgacatggtcacacctggttttgattttgattttcaacagggagaatatattgtgctaaactattgctagactcgaagatgaatttaagagactatcacatgcagtgacgtggttgtcgcctaaccccgtcaggtacgtaccgtggttcaactgtttgttctatttgttttaaactacatcgatctatagactgtactccgtagtgctctattcatgttcaaacataatattgagatgattatatggcgaaatcttactgaaagtggatgtcttgactatctggggtactttatctcctgcagaatgaggtttaagactaagttcagccgaccataccccagccgcctttgttccgccaggggtggttgatcagactaatatgagtatcccctttgattcgcttgaaattagcatctagcattgtccacacccctcttacaatcccatttctgccagctgtcaaaaggacttacctgcatagaaaatccacaaagcggctgcacacattggcctagacctcagattgcgcatatccgcagcagctagtggctgacttgcatctgtctcttttcagtcttccaattgccgcacaaaagatttcagaggagattatcaggggtgtatcgttacccagcagcatctcaaacccgccttcctgtgtaccaacccaccgcaatccctctcctaacacaacaacccgttccccaaaccagacaccttatcgtctgcccgcagtacccacagtcgcacccgtaaccgtccccagctccaacatcagcatcagcatcccacatcaacacaatgggctggttcgacggtaaaaccagcgcagcttcgtcaacagggtacgcgcgacgccggtcatcaccgacacccagcacgcgcagcagacgcagcaaatccgcctactcctcgacgcagcatgcgcgctcggcgccgtccttcttcgggctaggcggcagccgaacaggcggccgatcgagtccatctgtgctctcgtcgttctcgtcttcgtcttcgcgccgggcccggccccgcgagggattcgtgcagcgcatgctccgcgacatcaagcgtctgttccgcgatatctatcgctgggcccgtcgcaaccctatgaaggtctttctgatggttattgtgccgcttttgacgagtggggttctgccgaaactgcttgctatgattggcattcgcttgccgcatgctgtaatgagtgcccttggtggcgcgccgaagcctcgtgagggtatgggtggtggtgagaggggtgtgtcggagcatattagcagtctcgtgagcattgccaagatgtttgcgtaggcgactgctctgctctgctctgctctgctctgctctgctctgctctctaggcctgggtaggctgttctgtttgcgcccgaggttcttttttttttctccacgatttgcaatgctctgctgaaattcagcacatgacgatcacgattatacacctactgtcctttgcgacttttctcgctcttatgctcctactcttttttttccccgttgggctttgccactttgcgatgttgtcatgaactgggaggcccgtctgaattcggtagaattgatttcttaggaaaagttgttgttttgtatgggcaatgaaaccttgaaagttcgaaaccagtctagagatacatgaagtctcctatttatactaaaccagtcaggtgttggtgcccaagcaggtggatatggcagcatcagacaggtacaccgcactgttgccagtgcactggccctacgacagacccgcctataaacctgccaaacataggtagatcttcctggcagaccgatatttggggtgtactagtatctgaagtatcaaatggatctacagggacgcagcacatattgtaccatggtaaacaatagccagtggctgcattattcggccctgaagtttgagatgggaaaaaaaattatgtgtacattttgtctacttcggtactgccaacatccgagcagagattctataaagcagcctcggggaattttgtgatctgcccggcaagaaagtggcgacaacgcccggtgcagcaatacagctgccccggtctatcatcgctgggagcgcttgccacgtttccgagagcgggagtttgaggtggcagtggtctcggcttcctcaaccaagggctcctcagcctcagaatccacttcctcctcaggagcagtccccaacacccgaccgacagtcttgttgaagcaccagattggaagcgtgcacaccatggtttcacggagagtagggcgttcaatctgatcaatgtcaagcaggaactcctggcgctcgccagcctcgttttgctcttccaagaacacattgccaatagaatcgacaatcagcgtctttccattctcagcaacaacgcgcttccgctcgccagtgctggcagtctgctcggcagtggaggcatcaggggcacgagcgctcacacggactcctcccttcttatccttcttgttctccttgtccatcatgcgcttctgacgacggttgacagccacggcaccgacgtcactggattcgggggcaggagggggaggcgctgcggcgaccgactcgattccagggataccacgaacgcctaattcatcgccccaggcggctcggcgggcctggcgaatgtagcgatcgacaaactcgcgctgccgcttccagctgaggatcaatgcggcgtagtgagcaccaccaccgaagactaggaacagacccaccagcacagagcccagaccaggacggaagcgcgagtagtagtatccggtacccttccacagggggaagccattcttgaggaagtggtcataacgctgacggttggggccgcgcaggacgttggcgacgaggttcagacgagcggagcgggcatcggcgttcttgactgcagcgtcaatctcgcgctgggtaggacccttgttgacattgacgccctggttggacttggccttgttcttgtccttggcgtagttggcaatgaaagcgcgcttgaccttgtccgggtggatggttctagacttcttgcggtaggccttggtgatttggtcttgattggcattgggacgaatctcgaggaggtctgcagtgcgggtactgagttagatacgtatgccttaaaggagtcgaaaatggaaaagaaagaacagaaagaacagaacgcaatgctagagcgacgacacataccgtaaaaagtcacattggcaccttcgttggtggccacatcattttgtagaccaaagatctcatagtctgttccaggtcagtagggagggttggtccggggtaaacaatacccaccttctttggaccaagcagcgacgaggccgaagaagacgaagagcgagagaaaggcaaatggcttcatgattgacagcggtcaatgccgcagaagcagaagtctagaaataaacgaataagctgagtgttagtggaggacatgtaggaaaaaaagcggtcgggcgtttatccaccgaaccccaacgtggccccaatggcgatgtttctgcttggacgagtccagttgggctcatgaatgattgcatctgagctcactttgtacggaatacggagatggtatatatagagggatagagggatctagattctacgtagtctcattcttctccagaagacatcctaggaataacctcagggacccaatcctattattagtagggagtccctaactagctattccatctgactcgatgactcctggcctaaaactaaaacacgaaaggggaaaaggccaagaagggaataagtgattgccttgtctccgtgttgtttccggcttctctctttcctctctccactatacccatcacttttgttacctgtcccatttcccaggctttcttattctgctcttcttcccttcttcccttctcaaccccttcttcattcaaaatggtctctatcccaattgatgcgatcacctcgcgttttggcgatcgtctcaacaactttcgcagcacctctttaaccacccgtttcgccaacctgcgcccgatctccgagttcctcgacgtcaagcgcctatccaagcctgccaacttcggtgaagcgcagagtcgcgtcaattacaatctgtcctacttctccagcaattatgccgtcgtgtttgtgatgctcagcatctacagcttgctgaccaacctggtgctgctgttcgacatgatcttcatcagctgtggtatctacggaatcaacatgctgcagggtcgggatctggatctcggcttctctcgcttcaccacttcgcagctctacaccggactactcatcatcggtgtccctatcggcatctgggcctcccccttcacaacggccctgtggttgattggcgcgaccggcgtgaccgttttcggccacgccgcatttttggataagcccatcgagaatgctttttccgaggaggcggtctaggtggtcggccgcgagctccttttgatatgccctcatggggaagaccaccgggggcacgaacggggagaaatactaggggacgcgcggcgtgggaggagactcggctggaggaggtggatagtgaggaggatgcatacgggcgggagttggtgcggagcggtcgctacagggagtatggaggacgagggctgcggaggcgacctgtggattacgaggatctgacggatgaatctgaagttgatgggggagaattcgatctatacgaccatgaagatagcacggtggcctatgcgattcagttggccatgcgggacaaggaagatcaattggtggacacagcgctcgagcgaattcgtcgcgcccaagttctggggaagaaaaatgtgcggctgtcgaaacccgagctggatgccctggagcgcaagcgccagcaagcggacggtttaagcggaagccgacgcccatccaccagttctgtcaaagtgacgtcgcgcccatcgtcccgacggagtgcagttgttgcgccagaccagatgtccggcgcgtatcccacctttgctgatgcacacagtatctgggctcgtgggacgggcgcgaatagccgaccgtccagctcatcttccgctccccgtcccgggactccaacgactcaatctcttcgtccacagcagtccagttcacctcttcgaccgacctacccgccatacacccccgagcgatttgcccctagtggccgaccacagtcgatgcaacaaccgcctgtgttccaacggccactgccagacgatcctcaatgggccccgccttactacaatacaatgcagatgagctcatacggcgaacctgcggcatacccaccgcaggctgccaccgccggacagcgaatgagttacccttccggctctgcatacccatcttatcaatctcaatccccgggcaaacgctcactgcaaggcacaccacaggctcggaccgacccagctccagcaccagctccagctccatccaaattggggtcagaggagtccagtgaagaatcggagagcagctcagaggatgaagtgcagatcgtcaaggtggccaaggtggcggagcgcaaggccccgcctgctgcagttgcgcagaggcggccagttactggaaccactcgtaagcggaccagtcgatgaagtggctcagcgttgtcctgatatcctctaaatttcactttctgtctgggtttttttttctttagtgtttgttttttctcgattccatcattgcggtctttccgtaccgcgacggcgttttaaatagaccggtaggctacaatattatttcctggctcatttgatgtccacgtacgtatcttgtagggtttaacatgactagaccgatgcagcatttctgaaatgtctcaacatgctattctcggagtagccccaaaggctctagtacctggtattgccaagtattcagccacccgggctacccgtagatcgtgtgccaaccttggatcattcatatcactcccaaaggtcttcaaaggtacgatgtaaactcttatataactagggcaagtacaatataaccattgcagtaaatcttggggcagatctttcgaaatgaggctgtgggggcgcacaaatttcataccttggcagcccacgatatgacgtcgccttcacaatctccaggttttaggggagcctaaagaaaaataaataacagcttgaaccatttctgtctttcgcaactgcttctcctttcaggatatctaggaatccactataccacaagaaatagacattccccttgcgcatcatcgttgacccggttccaattcgatatccctttgtcatctaagcgccactgtcgccccttaagacatcatttgaaacctggaatgctgtattcctatgctacattgtacataaatacagggatatagggtgagtcgcacgatcggggaacatacttggaatccataccttctttccatcctacagggaaccactgacaccgattggagaagctgcgactgacaggatactataggctctcgttcgcctcgtcactctttcaatcctcaaacccccactctctttgaattggtcatttagcgggcatacaaagatcttacacaccttcattgttgcatcaaactcagtctcgaagaacaaatcaccactcgaaagtcgacagtcgaaagtcgcaaacatgtggattatatcattttggatgtttccattggtgtcagcctgcatgtgggttggtaaggcatccctgcatggaaatggaacaggatatcttgttctgggctgcagctaacacggtcctagcaatgttgatcgccatgctggtcacctgggtcagagacggcagaccgcactatgccagtatggaagcgggacagactattgcgtatgtttcctctccgctattagcccatgcatgcgctaataggttttcctacaggtacatttcagatgttggagcacaaggcttgaaaccgctgttcatcgcaggcagcgtggttaccgtcgtgtttctcgatttggcattcctctccgagcggtggcttcgacactccaaccagttggcctcgaacaagggcaggttggacaaggcatgcgctattgcatcaatctttttcgcgatcgccggtgctgctggtctgatcctgctctctatctttgataccctccgccacccgaaacagcacgacggtttcatcgccctgttcatgtgagtcttgtgtactcgactatgtatagtcaattgtgaactaatcaatgaatttctctccagtgctggatacgtgattagtgccatcttggtttgcatcgagtaccttcgcattggaatcttctaccgtcgcgagcaccgtattctgctagtcagtttctttatcaagcttgtcttcgtcatcttcgagctctccctcgccatcgccttcggtgtctgcatcggcagcaaaaagtcgtccaagcaaaaccccggcgcggttatcgagtggaccattgctttcgtcttcactggctacgttatctccttcgttgtcgatctattgccttcagtgcgcacacgcaaccacgtgcctcagggtgagaagtacctgatgaaccagggcggattcggcggaacccgcgaagaggctgtctctatcgaagaacccctgactcatgactcgatgggcccaagcaccggcttttaccgcggtcagcgggtctaactaattctctttgcttcttatattcctgtatttacttatacgacctgcacgatgtcatctgatactctgctcttgttaatgtttgtttgatacctgtcatggatactctttatatatggtgttttcaggttgggcgccgttgtccttagaatacatatttagtctttagcaattcaataactcaattttagatgcttcctatacttctagatacgaaacgaaaatatccaatcctccaccatttatcattcgcttccaaatgcccatacatataacaagaaatgctagacccatcccaatgccaggtcattatcgtatctacatatcccatatgaaatacagaaatccatatccatccatatacccaaactccaaaccccaaaaaacccaaaagagagaaaaaaaaactcaaaccaaaaacttcgccctaattctctcctgcatctcaaacccaaccccaacactctccaagtaccctttaacacccccatacctagtctcaaggtactcagtcgtatcacgcacaaagccaggcggacaacgcgtatagtcctccccaagccccagcgccctaatctcctccatcctttcctcaaactccgacacaagctccatctccgagcgactgtagtcttcaacaatcgcctccaccggcaccacattcccaacaagcagcaacacaagcaacacaaccaggcccgtccggtcctttccctgcgtgcagtgcacgatcgttgggtaggtctcctcgcaagccaggagctggaacacggcgcggatctcgctcatgctggaatcaagcgtgtcttgggctagaccggttagtccgcgcggttgcattactgtcccgcatactagacggactgcttcgctgcggtagcctgttgttatcaggccgattgttttgcttttttgggtattagttgtttgtttgtatataggatataggtaatgcaatgtatgtaaagctgcaggtgaagaatggagaagggggagggggaaattcttacagatatgttggccagtctagtttcgatattaaggcgcgttcgaagcctttgccggttaggcttattagagctcgttttgagccggggatttcgagcaggtgctcggctgggtttgaggggagtgagcctgtcggtgatggtgatttctgtgatggatttgctttggcattttcgcttcgccgtttccgcgtgcccattcggtgttcggttctgtgttggggattagtttctgtttctcgcgtgcttgattctgctgttttctgtttcgacatactgggaacggagatcgatgacggtgtgaatgtgtagttcttctgctagacggcgtttatctcgttctgaggcatcgtcgagctgcaaattgcaagttagttttttttttttttttccttccttctcgtgtttattctgacaacgcatcgatcgtatgagcggggttagaattaccctcgcactgcggaaaaacacgccttctttcaagatcctacgtgaaatcgttagcagctgtgtctagagagacttgaatatatgtatctcgggactccagacgcgtctgaactcactctttgttacagaattgattaaccgaccggccgacatcgcggaaattgatgatgttgtcgaaaggccgatccggcgagtctagatccacgctgttatggcgcgacatggtgaattagggattagggaatataaaggaaatatagacaggaatcttgttagaaatgagaaggaggagcgtgtttaaacgtgtggagaagtacaaatggcggtggacgcggacgtcgacgttgggcagacatcgcgtttttggccgatagtcgcctggacaatgaacgtttttggcttttaggagttatattcattcaattgtcattggttatgaggatttattggtgactttggtgactttgtatgtgtgggtggtttgaaggggtgactgtacgagtgttatattccaaggtccttttgtatatttttaaaacctcaatgttgacagtctagcggtctgttacttgatcttctaatcctcaaagcaaacaaaaaacaaggaagtagcaatatacagtgctgaaacaggtaccggagctaaacaaagaacttagatctaggccccgggaaaatccagaacaaggaaggatctcgattcaatgtgtcatacaacaccacagtcaacacctttatcaactacacatattgctcccggttgttcttccattgtggctgcaggtatgaccaatcgtgattgaagttgaatcctgtacgataagccccatatgcaaccagatccacctgactcagtctcgcccctcggtccgtcagcgcccacagactcatcgccaacgtgttctccccacggttattgatcacgccaggtggaaaagggaacctagtctggggaccgatgtgtggcaggtaatgaccgaactggtacccattcatgaagatctggactactgcggggaaatcagcagatgcatcgagctgcagaccaatcggaacgtccaggtcggagtccaggtcgagctggaacgtcgtcgtgtagaaccggcctgctgcaccagatatgccgtccagcggactgtgcgaggttgcggtcttgggcgctttgtatcctgggagatgccaaccgagacgctctccatagagacccccttcgttcatgggtccccggacgggatcgatgttggcttcgcctcctgcattgccttggatgcgccaggaagtgaattcgccaccaagaagcgtcgcgcctagtataccacgcgggttttgtgctccgtttggcgacacgttcgcctcgtcgtggcctgtgtaatccatgataacggtcagaacattgtctgtcttgcgcaaggtagcgctgttgaatagtagctcggctgatgtcgcggctagggtcggatcaccaatggctccgccaacatagactccgtttagccaggcggcccaaccagcggctgcgccgttctggacagtgagatttgcgcctgtcgcggtcacgccatcgaaccgtccgcgatatattttcgttccggcatggtagccgtagtcgccagagtaaagcacgggaagtgtgagtggtgccacagagttgactgatctcgttttgttgcagatggtccagcgagaatcatcgtagtctgccttaatctccggaagggtatcttgcgctttccatgatttcagagtcggcagcgatactttggcttgggctcccggggctgatccgattaagctgccgtatggtgtcttcttggttgagatctctttgccattccacttgattttggtcacctttgagttgcccgtgtagaccctaacagcatatattagcgagtaaattatttgagagcttcgcgcttactcaatagatgttgtgtttgcgttgtcaccaacaagactgacagtatccccactgacagtcgctgtgcgaacgagatatggcccaagggcaatgatctgctcactgggaaccacaatcggattggaagtagtcggtactgcaaagaagttccacgctgtctccttatcaagaaggtagaccagtacgccgtgcgagaatttcagcactgtcgtgccatccccttgagtgtatgtgtatttcgtgccatgattcgatgcaccagagttgactttcgaattcccgtaagtttggaaagtcagatgggtcggtgcgtctttgaatacaaactctcctttttgtccgatattcagatagaagacaataacatctatgtcgagggtggcgtaggtcaagacctcggcggatgaatagagcaagctcgagccctggccaatccggtagtcagtgacgataattttgctctgacggccggccaactcaatattagggattgtcagggcccctgtcgtgtagaattcaagttagcgcaattattcctctcaaacactggagtacgtaccagccgatgtattgacattaagtgaagtagtggtcacagcacgagatgagctggtagagtgcgcgagaacatagaaaccggcttgggtttctgggtttcgcaaggcccacgtatatatacccgcatcactggtgtaccctgttccattcccttccatttgcatttgtaaaagaccagatgacacgcgcgtaaacagaccgatcaacttggtctgcttgagtttgtcccgaatctcacgcgtctctcgcatgggcgcagagtagtcatatgaagtatagacaaccggagcagcactgtggccccaagaagttgcccccatcaccatatatatattctgcaatgtgactctggagccgatattattcttatagtagacatcggcgaattcaggcgaaagctcggtagaacattgatcgtagaacgtccctccccagggggagaaccaaccgccctcaaactccggcagatactcgggctgagaactcgagtaattctggaaccattggtaataagtgcggacgagattgaacccagtatctggattggtacaggacagaccaccaggataggagtccaaaccatagacattgacggcaccacccacatcctggtagtccgtcgaccagctcatagagcgcattcccttctcattatgcgtgctcgggacaacgataccagcctcattgaaggcggctttaacttgttccatgtacttgacaacagtgttattggcactgtgtgttgtctcctgcaactcattctcgtgctgattgagaatgaccggaccaccgcttgtgatttggtttgcggcgatgatctttccgatcttctggatccacggataccatcggtcatagtaggtgcttgcgctcgtgcgcgtgctgcccatttgcccattggatgcccacagtgcgaaaccaccagcagaggtctcagcattgcagtaaggtcccgcgcgcgcaatcacatacagacctgcctgcttggcataatcaaagacgcgctggacgtcgtgggcaccgttctcgaagtcgaaagtatcttcggaagcggagtggaaattccagaagaagtagactagtctcaatgagtaccagtgcagcctgggtgttgtcaagccactcactagaaatcgcattgaatccatttgcgcgtagcttctgaaatacgtcgagccaaagctccggcacggggagtcgctggtagtggaattcaccagagaacacatataccctctctcctttaactgagaggctgtattgatcccatgtcacatcagtagtcttgccattatctgtcgcagagacgaaatggctggatatgagtccaaggagtatagggagaatcgtgagaagacgcattattgggggctgcacaggtactctccatcttggaatatgacttgttataatgtgtgtatgcttcggtcctcgctacagaaataccccgtactctgctgggattggtggatgttttgttttggagatcgaatgtcggattaggcaattttccatgaagatgcgggggaatgatcggcttttgactagggacaggtggttctgaatgaattttggacattgaatacagatatacaaatatgcgtctgtacttgatttcctctgccacttcttggctttccctttccgtcttagtgctcagtccttgccgctttttgctcactgaggacaactgagcacgtcgctgagtattacctaagctcacggacttgctcaataaaatgcaccacgctagcatccaaatgcagttattcaccagaactcaagcccactcttgaccgttgttccctcaacgaaaagatgctatgccactattcaactcgccaagtctcgtattccacaataccgtctctacatagttgcgggaaatatccaaccctcagggactgaacgcacttttgggcggttatgttacgatcaaggcttggtagttcttttcttatgtcgttggctcgttggctccttccttctctatagggatcgttccttcctaagctgtaggagagtatactagattttgcctggcaaggagaagggtacaaaactcacaatggccctgattcctttcctttcccccccatgttcgatgttctagttagaatgtactctttttcataaagcatcggcgcgtaatattatatattacacatgcggtttagaccgacactttaggatagaggatatttgagcttatgagatgatattatcggctgtagttggaccccagaagagatatcgattgagttgactcctatggcccctgacactactgtttactcatagctgagacagatctcagctgaccgagagcttccccattgaatgcctcacttgtcaccgtccagtgccgagaaatcagtctcttggcaatattcacggaacgaggtcattttcagaccaagctatagaaaggtcagtcatgtcccagagtggcaacgagatcgaataggataacataccttctctggtcgtacaacagcaggatcgataccttcgtacccgaactcatgtgcaaataatacattgtgagcaaattcgtgaccaagacctccgggaagcaactcgcagaatttatcgtaggaaagctcgtcatagccaccatacttgaaaccttgggtttcgcaaaagatgcggaggtaatctgaccacgatacatattcaccaacagcaaataaattgacattgggctcggactctgcaactgccctgacgcaagggccgaaatccttgcggacatgcccgaacggaatgcccttgtcacctgggccaattcctgtcattcgccaggtgccatcaactacctatgcaacgagtcaataccttcaaaatacgcccgggaattacgaaaaaaaaacaaaagtcctggcggggcgatttcatgattcataccttcttcggggttgtaggaagtccccactcccaagggagctggaaatatatgggcgcctgaacctgcgagaattttccagccagggccgggatgctctgtgcgtagatggcagcgtctgctttagaatccatgtgataaagttcggtgaacttgctgttactggaattcttcgcatgggccattgagctgaagatgtatcgggataggccaggaacagtggccgcagcatcggcaatattcttgccctgttggagctcgacatcgtggcaatattccacaagtgattggccgggcttcttcttctggtgactttctggatctttgaagattgtccagaagtcggtgacaccaaaaataatgtcggctcccacaaaggcctcgctcaaggatgccacatcatcaaggtcacctttgatcatttcaacacctttcatctcccatttctttgcagtatcagatgccggattgcgcgtcacaccgcgaatcttccagcccggattcacaaggtaagcgtcggcgacggagcttcccttcagctttggtgttagtaacctcaggcaatatccaaagaaattgtacagggagcgattctaacttacttgcacacccgtaataccgaggatcacaataagtcgcgacattgtggaagatgttcggtaataataagataatgaccactcaaccgaaaaagtgattgagtgtcttgggctccaataatcgaatcttcgatatcctctcaaccctggaacctggcaagacctcagaatttatatcttggacttccaaaaaaaggcatcatgagacatgaccaagctgtacttcctgattgataatctgcatttccgttgccggtcgcttggtaatataggaatgacgcaagcaattatcccaggaatctcgtgaatgtcgatactgcagggcagaatcatctggtttgcgatcagagaagccagagagacccacttaattgaatttgaatttgactttcgccgttgaacttaaagtcgcgctaggctgtggggtaacagggaccgacatccctatccggttaggctggactgctcactgctttcccaatcgggaacatagtcatatattgcttgtatccctatcaacgagtgccacagcgttctctttgtctagtcagatgtaagagtctggcccattccacggatttgggcaatatcggacttcggggcctgaattaataatatcgaattcgatgagtgctgtatgtctgcatcctacttaaagcaaagctattcgctacatcaccgtaacatctttcctcacgcttccacatttcactgacattgatttcattttacatcttccctccaaagctctgacttgcgacatggccctcaacaaggaactgtcctcaacctataaccagtttcttgaaactgcgccgaaggaagtgtcttccatcatcacggacgcggtcagagactttaaaaacagttacgatcctgctagagcgatccagccgggggacgcctttccacaatttcacctgagcgatgcgaccggtaacgaagtgtcgttgaatgatctccttgttgaaggacccatcctgatatctttttatcggggtgaatggtgtcccttctgcaacctcgagctgcgtgcgcttcagagccatatggacgagtttcaccagaaaggcgtgacattggtagctgtgtctccggagctacctgatcaatctctgaccacatctgagaaactgttgttgaagtttccagtgctttcggatgttggtaatcagctggcgaagaaacttggcctgttgttccctcagcccgagtctatgcggaccgttttcgacaaatttggcgtggattggaaccagcggtacggcaatgacaacctggagcttccggttccggcaactttcctggttgataagaagggaattgtgcgcaattcctttgtgaatcctcagtatcgtcaccgattggagcccgagattgctattgagtggattgaccggctttgatgttggcttttgctgcgcgctatcttcacactcgctttgaggtctgctgcggctggaatatacgcgcgggggagggggctggttgattgggtttcatatcgttagtttggcttcgaaggatctcgacaccaaatcccaagtaactcggcgagtgttgagtcatgacgcttttctccatcccgaagaaacctgtgccgtggctcgtggtcgatcttttctagtctcgcttcctctactctagaataaacacattcgttgacttgcacttttagtatgctgctcctgtaactctgcttgaaccataaatctccgtgctaaatgtgcttttgacgtattatttaatccggtgctctatattttgaattcttggcatctcgtatcagtgaatacgaaactagtgatgagcaggtcaccaattctgctgagatcgcgcatggattacaaagcagcccacagtactttgctgattaatgccctggtcgtcgtggaacatcaggtgagccacacgacgttgagaagacattaggacaacctaattgatcctaacactgaagaaaacaatggatagtgtagactggaagtctaggggtgctgagccaccgacacgggatgcgcagatcctccctgcccgtccctcacacggatcacgaatgttggcaaggaagcttacgagtgtccaaccgtcggcaactcaagacctcaggttcataaacctatctcacccagatgacttacaccgacaaaaagaggtaagaacggagatccgtcgccatgtcatgaaggatataggccaacgacggagacgcccacaacccaatgcaacctcttcgcaagccacccgaacattttcttcggagtcaaatggttacaaaatctctcagcttcgtggcgcaatcataaacagcgtttcacccagccaaaacttagctatgctcgctcacttccctgtggaggctgatatgcgcgctctcgaactgatgcactctggtaagagttccaagctttccgttggcctctagctcctctcatctgttaatgcttgctctatattagtcgtcacgggcccttatcagccattcaggggtgtttggattgaggtagccctatgtgaccccggggcattccatgtgactctcggcaatgctgctgattttctcaataagattaatggcaatcaaagtgtgaaaagtccggaggctttgagtcactttgaaatttcaacaaggaaactaagacagcgtcttaataacttcacggagagtattagtgaaggggctattgccaatatattggcccatgtctgtctcactgtatgtgctatattcctgaatatgagctcttgaataacctcttttccatagatgaggcactgtgattgggatagctggagtattcacatggatggtttgagtctcatagcgaaactacgtggcgggtttgccgacctcggacatcgcatgtcacttctcatactgctgtgagtactccgtacctctttcattttctagacaaaacttctgactgttccttgcaaaggtacgatctagctggtgccatggtctttgattcctatccgcgattcgatctcccagcagagtttgttggcatatccaatatatcttcgagagggcttgcccctaggctacaagctttacttgtccaacccatatcgcccgcatttttcccagcgggccaagcattaacaatggtttcctcaattgcggatgtgataaataccactagtcactccgcatcattctggaaaagggatatcgatgcaatccgcctgatcggtccctgtattcactttttgctctcaatgccgagatttcccagcaatttcgaggccatggctgatcccgaagaccttatcgcgagagaattggttcgacttacatgtcttatgcttatgtcgaaattgaagggacaattcgcattccccccgagtgagctagtttcactacctgctaggcttgccgaattcgtgcctccgaatgtaaagaggctcggaaaaaagtactttgagctgaaaatttgggcccttgtcaccattgctttattgcgatattgtgacggaagagaggtatacatacaggagatgaaaagagaaatgtctgcaatggaaaaagcgacaccctacgaaattactgggattgccagagatatcgtctggatcgacatcttgatgtcaccattttcagaagagctcgcagcggatatgaaactacacgtcactcctcgaggaacctgttgaggtcattgacgctaaatctaataagaaatatcaacccacgggtttcagcagaatgaaaatgtaaatttgcgtgcatagctctatctgaaaccaagacaagtcgtggatgtcacaactattgcgggatggagtagctgtgtcagtttctcaggatatcagagtaattgaaaatagggagtacaccccaagacgatcattgtgagatctcatttgtattggttatttggatctgtatttacataggctggcgggatgaaggaaatgggctgatttccgcactcttttcagatcagcatctgttttccatttcggcaatgttgttacgtgagaaaccaggcatctaccggcacttgattaatgaaaccttgaacgacggtgatatttcatgcacagaacttggaaaactaatcaccaggccccaacctcttccattcataaccttctcgcataccggtttacttctcaaatatggctaaaccttgtgaccgctgaccagcgcccaacttgtccagctcaaaatgctggatctgccggccgtcgaaagagtcaacaacggtgattgcagcgactttggtgccatttcctggggaaagtgcgtatacataatggccgatggctctgacatcggtgagaccgtggtcgccatttctcaggtctaggatcgttaagatcttcgagccatcattgcggacttcaactagtctgttagatgctgcgtcggttaaaaatacactctctcgcaacggagagtaggtagcccaacacgtggctttctggccttcgatggtgatcttgtgcttgagagagacttcatcggtgacgtcatctaggataagaacagtggctccgaaagatgcgttcgtgatgaataggtcagatgtgccggggatttcaacgccaccaaatagcactgccgtactgggcggagagcttcgaatatcatgactctcgaagaccgacgaacacgaatctttgaatggcaggacagatacaaagcctgctttgccagcagatgggtcccccttcaccgtggtgattagacgtgtatcgtttgcggcaaagaatacccgtgcgactgtatttgttggcccaactggaggtgtggtttggtggagttcgatatcaattacttgatccatctgctgcaggccctctggtgtgaattcagcgcaggaaacgccggatttggccccagtgtatcccacgcaaggagcaccactcccaggtgaattggaatagaaaaatgcatcctggtataacaagcagaccactagcagtgaagaggggaaagaaagatgaagttgagctgagatgttttcttgagaattaccactgctcccaaggcctttaagtatcattttcttgaaatatcaataactaaacccgcgtgaaaagatgttatgaatctaccgattcaggaaaccatgtttaagtcaacaatgctacgctagcggttccacacgccgtcgttttgtatttcaaatcattcgagatagtctggaaaagtaagaatgtttgaatcgtcactctatgcccgcccgtgtgtgggagtctcgtacggagtaatcgaaacattttagagatcagtagttcgatatagacttcggcttagccccgaatagacgaaagtgattcagtcaacaatccgcttacatttatgggtctcacggaaaagccgatcttccgctgataatcttgaagtccaagtttggagcttcattgtaatttctaatccaaggtcatctatctcctctgcaccgatctgacggacttgacgtgataccaagctccacagacccaacatgaaaaaagcatttactttccttcctggatagagctgttgttgaaatccggtgccaatgtgaatgcaagaacagtcagacatagcacgtctctgcatttggcagtcgaccaagacgcagcgaacgaagtgactggattactttttgggtacagggtagattggaacagttcaaatgaaaaggacggacttgatacaccgttgaaaacaatggtaagtcgccttggtgacatgtcgaccggtttgtatatttcagagacatcgttaattagatcgattatataccaagcatccaaaaatcattagcaaagtaaaacaatccgaccctaatatcctccagaagcaccgatttcaaattccacaacaccaataatcatcccaagatccaaaaataataaaatcgtacatcaagtcaaacgtttcaaatagaaatacacatcaacattcaatatgaatatcacagattctcggagaatctcgattctcttctcccgttcagtgtgtcgccaatactaggtggcacaggaagactctgcccgatagtactatcctgcagactctggagatcaccgttcccgacacccttagacgcagattgaactcccgaatcacgacgggagtcaccctcgttcgacccatcggggctaccggagacggccttgcgtaatgtcctgctcagacggttcctcttcctgccattgcgattttgcttggtaaactttggcaaaggatcagcactatggatcttggccacgtcaatgtcgttgctgtagtagctcgaagatctgttgtgcgtcgggacaggttcaatcacaccaggaggatgtgaggcaagcgctacgctgcggggctcgtcgcggccggtcagagtggcgccgccttgaaaggcaggttcgctgtccgtgttaatgtccggacctggctgatgagggtagatggggactgggccactggagcggcgaacgagacggtcgcggaaccagttcttgagcttcgtgtcggcgcgcgggcttgtaactggtggcgtgaagtagtgcaccatcgttgggcctgaggcggctgcatctcgctgctcaatctgggcgggctcggtctggcttcgtaacggccgccgcgggattgctgcgggcacgtcactctcgtcggtctttgaaggttcagtctctgagaccgaggagtcagctgcaagaacagttgtaggaccggctatttcagtctcaacagaagcttcgtcagggatgacgctcgaaacattgtcgtctgtcgcaacattgtcctgtgtctcaacattgcgttctgttgcaacattgcgttctgtctcagtattgccttctgtctcagtattgccttctgtcccagtattgccttctgtcccaacattgccccctgtctcagtagaagcgtgctcgggagtgatgtctgtcgcaacattgtcgtccactgctgtagccggagccggctctactacagcttcctgggtaacaggcgagacagcttcggcctcttcggtttcggatttctcaacccgagctcgtttgcccttcttcctccataagaagaatttgggaatcttgctctcgaatttttcgtgcttgcttgcacctgatttattggtcagaacatatcaagaaaaaatgacagggtaactgacctttttcttgcttctccaactctttcacctcagcttcgcgttgacgctccaaatcagcacgtcgctgctcctcctcagcgtccaaacgggcttcgatatcatgggctctccgtaattcggcattctcggtaatctcatcgaaagcgggctgaaggcgagcccgagctacagcatcgacgtcggccatgtccatatacctttggccgccgatgttcactcgattgtcttgggtggtagcggcttcaaaatcctctgcctcctgtcgtgcgcgctcctgggcaacttcatcccaacccctctggacggaaggcggagcgcgaccggtgtccgcataaacctgcgcctccatgtcctggagggtttgctccacgttgcggcgagcagcctgcataagcaactcacgatccttgttcttctgcacatctacttggcccagcttggtccgcaggctagtcatctggttccggatttgccgcgactgctctacatcgagctgagaggcatccacatcgctagaagttctcttgcggcgggtggtcaagcgcgaccgttgcggttgcggtgcggtgccataatattgttggtattctgcatgctcatcctgcataagagcaagtttctcggaagctcgcttttgcgctgcttcttgtagtgcgatcgcccgccggatagcatctccatctgcggtggatacggtcttgcggtagcccaactgactttgtcctctttgggctgctaggatggcagcggatctgccgggttgtttcttggtactggtgactctgtacatgtcccttgccattgagatggcagcagcgcgttgcgagttcttgtagttttgttccacaatgtcgctttgtattggtggcgatgaagtatatagcttcgggttagtgctagcggcatgctgtatcctgcttgcttctatggcatggtctaagtggttaagggggggctccacttccacacgagcattttgcgacgcgctagcagctgaacggctgtatggtatttctgaggcaacccctggatcactgggtgccgagtcggctctcttacgcgagagcgtgtaagcgcccgacgcagcctggagcgccttgtccttcgggttaccaccgacggctgtgtagtggaaacgatcggtcgctgagctgccacgcctatgggaagtggacgtaggggcctggctcacggaagccctttgttcacgaacagcgagcattgcagctcccagtccctctgcactgtgctgagaggtgggttggggttgctggggcggaacatagtccttcacgcataatgcggctttctcggcggcaggctgtcttgctggtggccgccatacttcgacaggtttgcgattcgcatgtgcgagagcggaagcagcggaggcgtggctgaggtttggagtaccaccgaccgcgcgtgggtctaccgcaaataacattgtcagcttgtgtgtatttcacttatcgagggaccatactcactgaagttctgggtattaatcggggtcggggcgcgaagagatgccctacgttcagggtgtgtcacatataaggcagcagtcgcggctaatctcacgtgaggttagcgatccgacggatatcctgggatgcacgatcatcttaccatcatctgccagccgggactggcgagtcacttgcacagttgccataattcaggaactgcaaattccaatataaccaaagtcatgaaaaagaaaaagaggacagcagagaacaaaactataaggcgaggtggatatggaatggaagtccggaaagcttctttgatccccgtgacgtcgattgggaagccattgcatcatcgctttggagattttgggatttttttatggagacgatcgatctgtcccggagctacgctactccaagctccataggggctagtgaaagatctaagtggagtgaagattccgcattcgaacaagcggaggcccgtttttcggtggtgacgcgaggactcggagttctgatttacttctgaatgaaccctgatctacgtcgatctacgtcgatccttcatatttcattcggatactacatgtacctatgtacctatatgtaggtacgaagtacggtgatgtacatcgaagttagtcgtgagcaccttaataataaggcagggatcgccaaggatttcattatgaccgatgaacgagaatcaaaaggtcataaagtccccataaataatatccatgtagtattccgacgtattgtacgagtccaacatatcatgacccaaagtgtcatgcttccaatgttgcttccaatcaccgtcatctcgctcttatttggacacaagaacttcccatttgtctgcacattacaccacaccagccgtgtatcatttagctagtcgcgagtcgacatatatagacgcatccacaacagaaatcgaaaagcccgcaactgtgcgaatttatacaggcttgcgcacacttgcagaattctaactactaatttcatacccaactcgatggatcatctctcttatcgcaaaggtgttgtataaaattgcaggaatagtttcttcgggtactggaaatagattgatggacatttgcagaaatggttcactcagatactcgacataacttgatagttaacagttgatcagagaagaacaggtccctcgcctcgactggtgggtttcaatatcatgccgaggtcatcccttcctgtctcttgaatgagctcctccgccaagtctagtctccgcgtgtaaggggtcggctttccaaccaccttaagcatacgcccatacattcggaaaccctttgataatcccgtacataattccaatagccccgccgatacaagcatcagacaaaggagacacaggctacccattatggatgaatttcccgagatgacagcggacaaatataccatgagtgtcgagaaggtgatgagtagctcgtcaagcaaagttttgtctcggagccattgcccggaagtaacagccttcaagtcatcgactgtgccccgaagacgaatccatcgatcttgtgtgagtaaaatgagaagatcaccgttcaccccgggctctgtctcgcctttccagtcaatgtgactccgtatcttgatagaccaggtgttgcagattctagcagtcatccacatggcaagtgtcaccagggcccaccaatcttccaacaatgcaaggatgataatcacagcgactgtcaagatctgaccaattgcatagaggaagagtagagtcttaccagggctttcgatcaagcatctcaacttctcctttatggtagtcggcggcaagtccacgactaggttgagtagattacccgtttttccgacactttgcaaaaagtgcaccgtggcttcattctcaatccgaaagacgtatcctgacgtcaaagctcctgttgggggtaattctccgccactaagactaggggctgaggaatgtttgtgcatgccgggtgccagaaaaggatatccgcgagggatgaagtaccagtgatagcagtccatttggcgatactctgaagatccgccagagctactagaccagcggcgtcaagctggaatttgccagaaaggtcggatagggcttgttggaagttcattttgttaggatctgtggccgaagaaggaaaggtgggctgagaatgagagataaattcaaaaggtcgtagacaatcctatttatatgaagcgaactgagagtgactccgatgtcttcatatacacaaataggccgaattcccatactgaaagcagtttcctgtctacgccagcctcaccgtggttcgtccaataggaaggtgttctcaccctccaactttcgtgattgctatttttgctgcgatgtttcttttgtttcccaaaggccattctctttatgctgtttcgtgtatgttttgtcgcttatggactcacctaggacgcataagcggggctaatggtcaggaaaaatgctatactgtaccgtacctttagtattcattatatctttgatgccaattactagcccatgcagcggccctctctggtcttggggaatccaatctagctcacgagcttgactgagtacaaatgcgggatctgatgcaaactcagtagatattcttcgtttggatcacagacatgagcggggaaaagtttacctagaaatgcccatgctttgacaatgcagtcccgttcctcaatgcgtgctaagagagaatgggcgtattcctcgacagtgatcgtgttcttctggagtatatcccgcacttgagtggcggtcaagagatacggcttttccaccatggtcgatgatagttgggttccggacggtgagggccaatggcggttaaaatactggactcactcgagatagagaagtcgcacgactagataatgtgcatagcaaagaagacctcaagaagaaccgcatggtggggtaggtatctaaggaaaacatggattcttgaagtggatgtttcagcacgactttgtttagtctggagatattttgagaggcaccattgattggcgatagcatgctccagattcgaatatctaagttgcgatataagccacaatcgagttagagtcatcaaagacggaggacaacctcggaaagatcgtgtgtgacaaaggaagtgggggaaaacgagcgatgtcgtaccggtagctaatcaaaatacgacgtgaagccgagtcttggaaatgacggtggtggaagaaaggaaggggggaaatgggggcaaagaagaaagaaaagcgaaaatagaagtccagccacggaagaattctgtccctggctatgcatggtctttcttcgatgcaatattgctgccaatatgtaacatggaatgaccagatccatcgaagactttgatttcgatgttatttgtttggctggccaactcagcattgtcaccaatctgacccacgaaatcatccttcacttagacctctccgacatggatggtgcgtcgctggagttccatgcggagaatacgcttcagaacatcatcttcgccgtctataacctccctcaagagttgtaggctgccggaactcatagcctggatctccttcctacgcagctgtccctgttcattggctgtggaggggaaacaactccaccaagttattgaccaaatcggaaatgttctcgactaaattctcatagtttcctcgcttgtaaagagcccaagcaactcggtctctcttccgtggcttcaaacgcccatggataatatctggcatggtgaggtggagaccgttcagcgaatcgctcgctttcgcaagttcgatatctgtgtcgaggagcaacaatcactcatgtcatgtaaaatcatagatacccgccccttgaactgcccaaggattgcgacgttacgcattaccggagataaagcatgtcgaggatgtcatgacgggcaaagaaagaccggttccattttccaaagacatctataccgggaaacggttagtcgggtgcacaacacatcacccagtaaaacttacacatgggaatactcaacaggcagatgcccatttggatgctaccgatgacaatcatggtatgcttgatgcctccgtgggcaaaccatttgtaggcaaaaaaggtcaggacaaagctaaacatgtttttgaaaaccaacatgcaggtaaatgcctcaatggccatctcgcctagtaatgtcagcaatcatttccacgcaagacctaggagtccacatacgatgggcatcgacgatatagagtgaagcagcaacggctcccataaccatgccgacgatcaagaatgcaaagaagacgtctggcagcagccagccatagtgcatcacattattagcagtccacccgaacccatacagtccgataccacagaaaatgagctggggaatcaccaagaggatccggaactcaggctcgtatttaccgtggttgagccggatcatcagcttgttgatggaatcagaaagcagaccagacagaatgaggcctacaacagagccgataaaggcacccgtgtaaagatatccggttttgtcttcctcgaaccacattggaggtccgagaaacacaattgctagaaccacaccgacgaagaccgcccatccgatgacgacgccttggatcagacaagcctatactttaatcagcgtatgtgaaactaagcgaagtgggttacttacccagaagatgcccggatggaagaataacgggaatggacgaaggagcagcttgaaaaagctctcatctgtttttcgtccattgaacagcctgagcgattgggcgaaggaatctttctctgggactgttatcgcggcttccgtcttcgaacttccatttataccgttggaccttggtctaaactccttggtatcatcactggaagccccactgagtgaaacatgggattccatggactcgccgtgcccgccgcttcgcttgaagtcggtgttcaagtaatctgagcgtcggaaagcagtttcaggcacgaaaaagaacatcagtggtagtgaagaaccgaggaaaatcgccacaaagtagaaagaccactgccatcccatggacttggtgatcttgcctaccacaacgggtgtcagaaaggctgcaccaaagagtgcgacattggatacagccattcgctttcctcgttcctttattataccgattagtctcctcatgtgtcaaatctacaggaaaagtaggcccaactcacatgaacgaagtaaaggtctccaacacaggcatttaccaacgcctcaaacggcgccaatgcaacaccctggaatatccttgcccatatgagactattcttgttctttccgctaaccccagcccagatgcagctgacaatcatcaagacatgcccgatcaggaacagatgacgtttaccccagacccgagccgttggcacaatgagaattcccgccacgccgacaccgcataggtgatatccagtcaacagggcggctgctgtaaacgtgatttcctcgtaatctgcgatggtgactgtatttgcggctaggatagagcttagggttgtgcagaggatcgttacgaaggagaggatggcaagaatcgtatcgcgtcgccataatggccagttctaacagaaccattcgggtcaggacttttgtcgtggaaacaaattctagggtgcggtgctctctgggacataccaatgggtcgtttgggtcatcgctcggttgcggtacgaggataatcggctgattgcccgaccagtcgcatttaaggcctgaggcacccggggtctggtcgctcgcatcaccgttttgttcgtagatatcagaggtacctgaagttttgaagttgtgatgagccacgcggattcgcttgcgcctaggcgggtaaaggcatggaatcttacctgggacatgcgcgagcttcgtatcttccagtactccaagacccatgattgtaggaagccaacgaggcggggcttgtagataatgcagcggtttaatagaaattcgaacaaggtcagcagcgctacggagtaattctcgaccctccaaagaaggaagctacgtgaaaaagcttcccggggccaatggggataaatagcagatataaataaatacgagttcaacttgaggactatattataggactaaatataaggactaaccttggaaaagataagcagctcggtcgatatgtacataaggcccgagtgtgggcgtaattttgaatgtgatttgaggtaaatttcaagtctattgtacaatatacgacatgcaaagttccatctaagaccgcgtttgggccgacctttatgagtgaatatatgtacaggaccgtacctacggagtacatacgagttgcccaggtaagcctggatcggcgcttccaagcttagaccgaggcatcacattcaggctcgagcgtccaatattcggccgaggtgcaggtggatcttttacaagaatcaaacagcttggaatcagtgtttttgctgtagagaagttcgtgttgagatcagggaccgacccaccgagggggaaaaaaagccactagtgctgactgggggccttaaatttcccattcgaaccttgtgattggtatattactgaggtgtacaacccgaatggtcgtcataaagtagaaaatagagtgtggcagtgaattctgtaggaaacaaggcgatgggagaggtctatactcggaatatcgttgggaaataaatgccacaaccctaaacaaaaacctccacagctccatctaagcctccaggtaatttaacgaaataccaatacatggcagtctcaaaccacatacatttgagatgtgcatatcgattgattctacagcaatttcgcatcgtccatgtcctaagagcatagccaagcttttaaatacggactttgcctttcacaatatgcgtcgatactgaagaagagaaggacttgaggtccactgggcattcttgtcaacacgtgaccgctgatatcatgtgttaagtcatgtgatgaccagcgtcaccaacggctccagagctagactccaagttgtgaggcgcattatttccacagcagcggttacgacgtggtcgcgttccatattgaagtgacatcctcctccttgaagagctataccccgcgtcattgtcaaatcccaaacaccggcccccacctaagactactgcagcgagcgcgcgaagcacaaagcatttacgcaaaaccacaggtccaatacacctatccagcacatttttaattatgtcgtcggtctccccttcaaaggaacacgatcttgacccagaggcgcaatcgggggaagaacaagaccacatggacaaagatcaccacgacgcgcagggacaccaaggcgagtttgaggtgaaggagcaagatcggtggcttccgattgccaatgtggctcgtatcatgaagcttgcgcttcctgacaacgcgaaaatcgcaaaagaagccaaggaatgcatgcaggaatgcgtgagcgagtacatctcatttatcacaagtgaagcctcggagaaatgccagcaggagaagcgcaaaacagtcaacggcgaagacatcctattcgccatgacctcgcttggcttcgagaattacgctgaagcactcaagatctacctatccaagtaccgtgaaacccagtctgcccgcggcgacaatcagagacccccaagcgctggctatggagctggaggacctgttggtggccccgccggaggtgggcctggactagctcgtccgacgggcttccccaatcctgaaggcacaaatcctatgtcgaacctcagccttgacccgtccgagcaagacgcctctgcctacggctatccgcccattgtcggccagcctcacaacggcgcaggcggcgagtcatactagtggatgatgtgaaggggtcggctgacggacgctgcgcctagtttcaatattggctacatgtcctggagattaccgacgatgttgatttcaacggaggtctgagatgtttcagctaggggtctcggacctcagcaatgtgatgagaatggcggagtgttgagtttgcatacccgtgaacaccagcctaagataacttgaagaaatactgtaattgatgcctaactcaaacttgaagatttgtacgaacttacttaaatacccccgtaatataaataatacctttgaagatattaataaaatagtcctcattgctaggaagatccactttcggtgtaaaatatcaggagttctgatactatttaacatcatctccataccggccgaaccgcacgtgaaagagtctggagtttttgcggggaaaaaaggtaccgttcatctgcgtatcggcgtatttttgacctatctattggtttattaccacgacctggccacatggagaataaaacctctcacatttcctcccccaatcactcactttcatcagcctcaataggtatctgcaaagatgaaattcaccatcacttttgccctggcagctctattgagcactgccgctgctcaaggcctgggcgatctgcccgactgctcggtatgtgtttacagtcagacatacaactatgccaaatgtgccacctgctaaagaagccattgcatagaaaacctgtgctacgggttcaattccccagagctgcggcattgatttcaagtgcatctgcgagtccaagtccttcctggacgatgtcgcctgctgcatcgccgataaatgctccaaggctgaccaagaaagtatgttctcttccttttcctccatgcccaattgagtacgcaagtgcgggattattccaaaatgactacgcataatggatggcggaacatgtacattgggctgatatgttacacttcaccacagcaaccatcaaggtcgccaagtcaatctgtgcccgcggtggtgtgaccgacctgcccgccgaggtggtctgctcgagcagtaaatccagttccagctctggcaccagtaccagtaccagctccagctccagcttgaacgagactggaaccaagtctagcactgagacctcgagtgcgacggaaacttcggattcgactactgcgaccagtacgaacgcttctaccgcttcctcgaacagtgcctcgtccatctctgctgcggcgactagcactggtgtcgctgctcttgcccacagggattcttcgctcgtggccgctgctggtgctgcggcggcgttcgccattctgatctagcatgaggcgtgctagtgatttcaggggctggtacgtttggcgacattgaaatatcgtgatgaggatggtatgaatggaaacacgaaaatggcttgggatgcacctgtgtcttattttatccatgatataattttaattgaccggggacacggtatgtctaaatgccatcgcttttcaatggcggggggatatttcaagttaataatacactcatagaaaggattaccgaggaacctgtggaagtgctcaattctcgcgggtatcctccagcagcttggtcaggcgttcctggcgctcctcgcggagagtagcgaaagtctgtagagtagcacattagcatgaaaaacagccaacagggtcaattctgcccgattaatatattcccacttacccagaaccagaacatcatttcgaagaaagcaaaggtgaagaccaccctgttcttcaggcgatccagacctccaacagccgctgcgcttgtgtaagacgaggccaggtggtcacctctgccttgatagataaagaacgcaattccggcatacacggcaaagcgacaagcagcaacggcgacccagacgctccagtaaattgtcaaggaattagtgatatattcgggcaaacgctgtagcacctgcagatcctcggcggggaggttgccatttcgcaggggccggatataagggagagcttcatcgagagcttcgtggaaggggatgttggacagtatgacgacgtcgataagggcctcgacgaagatgaggatggcacagaaggtgaaaggggattgttgcgggctggacagggatggaaagtcctgtatcatgggtgttagcagccaaaatcaaatcgaataggaagttccaatgcccatagggtataaatggacatgtgaatcgggcttgttgatgtggacatacaatcttcaaggcctctcctatcataaacaccagatcacagtcggtgatcacctcggggctcttgatcagatagccggcgatcacaatcagaaacacggcatgtgcctggagaagaagcttggatgaaagtaaaaccatggtgggcgagtcacaatggcacaagtttgtggacaagaggaagttcccaaagtacagacagaaataaataaacgacttggagttggtccgagtgttggccgcaacacatgtggggaaaaagcagctccggtcgagatatcccccaccaacacaacaaccgcgatgattggatctgatttacgacttgatgcctgctgattattgaactgcgtggattactagtggaacatcgccctgttcctatcatactacatagtggtccaacccccatcctctacaatgaccgacccaaacccaaccttcaacacagagcgccatgtcaaatactacctccgatgcctgaagaccttcctcccgtccgcctacacttccaatgactctaatcgtatgctccttgcctacctgaccctctcgggattggatgtgctcggcgttctccaaagcaaaaccacaccggaggaaagacaagggtacatcaactggctctaccactgccaggtgccttcgggcggattccgtggcttcccaggcacggattttgggccaggaaagcgaaataaggataatgaagcctgggatccagcgaatgttcccgcgacattctttgcgctagtcaacttgctcatcctcggcgatgacctgtcgcgtgtcaagcgacgggagtgtcttgagtggcttcctaaagtccaacgcgccgatgggagttttggtgagcttgttggtcctgagggaagtgtagggggacctcgtgatttacgatactgctgttgtgctgccggtatacgatatgttctgcgcgggcggagtgagacggggcttgacggtgtaccggatatcgatgtcccaggttttgtttcttttatacaggcatgccaggtatgtggagaccttgatgttttttctgcgattgggacactgacacagtatggcgaaacagacgtacgacggcggcatggctgagtctcctttctgtgaatcccatagtttgtgtctccctttccaccacctggatcatctaacaaccgacaggtggacacacatattgcgcggtcgggtctctggacttcttgcgccggacctcaaatgatctagaatcagtgcccctactattggcaggctccaatcaattcgaggctttggttacatggctggcttcaaggcaaacagcccagctggaggaacccgatgaagacgaagattatgaacagcttgagatgacagagacgggatctatcgatgatagagtccgcaggttacccaatattgaacccctcggggccgacacaataccatgcgccgggttcaatggccggtgcaataaatatgcagacacatgctattcattctggaacggagcgacactgatggtacgtggccgcctagctagtattgagtgtctactaacgcgaatatcagatgctagaccggtatttcgtggtcgatggagatcgcaatcgtcgatacttgctcgaaaggacccaacatcttatcggtggatttggaaaggggcccggggatcctcctggtaaggcgatagtattctgatatcgagactatgttgctgaccaaacctatagaccttcttcactcatactttggcatggtgtccctggctttccagggtgaggtgggactcagcgccgtcgatcccacgatgggttccagtgaacgcacggtccgacatcttgaatcgctgccttggtggcaatcatgaagtatatacataacacgcctgtaaaatgacgatggttcattccaccaattggctcatgtcagcacacatcagccaataggtgtcgactaagttaattgggcgtcggtgtacatcgtacgttgtacatgtaccgtccacaagtaagggttgaatcttaggccgtaaggcagtgacaacacatattcttctacctacaacgcaagattatggcgatcgtgatcaatttggtgcttcactatggagggattctagccaattaagtcgcatacctctgaagcaggtaatttgcacagcgtcagcgattcctaaatagaaacggaggctacggagtaatgtatattgtatctggtataactattgcacatcaagataataatagcagactccaaggaaaaaaaaggagaaccaagtgccgagttctccacacggtccacgttcccgttgacgtcttggaatcttccaaggcctttgtatgcaatttcccttatcctttcatcatttgcggtgttactctatttctccggccatctttccgagcccccagctacccctttctaaaacttctcgacctccactccgctcataccgtttatccgcgcatctcgtgtcccgttgaatggccccggcacaactatttccagtcaaccccttgacgcgcagagactctcttgacgacatttggcaatcataacatatgccgccccgaacaagagcgggggttcaaagccagaaacaaaaggagaaggtgcgtcatcagggatgcgacatagggagctccaccgggtttcctttgttcgagccttgcgcagagtccgtggaaatatggctaactcggaattctcgacagcttgccaactcctacaatgagctccttgagtaagcgatcttgcttccggtctggatggtcagttgcgctaacgtggtgcttctctacagggagttctcctccaaggatcttcggactgtaggaaattatacattggggcggctaattgggaaaggttccttcggcaaggtttatctcgcctcgcataagctcaccaatggctccaaggtaggtcatatcatacaaagaaagttgtgggggcaaggctgatcaagttcgcaggtggtactcaaatcgtccagcaaggaggacaccaatctcgtgcgcgagatccatcaccatcgccaattcctccaccctcatatcgcgcgcctatacgaagtggtggtaactgagagcctcgtttggcttgtgctagagtattgtcctggtacgtcggcttgcgcatggcagacgcatagagaaacatactgacaaagctcggttctaggcgacgaactttacaactacctccttcgacacggccccctaccggtagagaaggtgaagcgcatatttacacagttggttggagcggtcgcctacgtccacagtaaatcctgtgtgcatcgcgacttgaaactggaaaacatattactggataaacaagaaaacgtcaagctttgcgattttgggttcacgcgtgaatatgaaggcaaggctagctatcttcagacattctgcgggacgatatgctatagcgcgcccgagatgctcaagggggagaaatacgcgggcgaaaaagtggatgtatggagcttggggatcattctatatgcgcttttggcaggcgagctgccgtttgacgacgatgacgaccaaatcaccaaaaagcggattctgtcggacgagccgaccttcaacggaaagttcacggacgatgccaaggctctggtcagtctcctattgtccaaacggcctttgattcgacccagtctggatgagatcctggcacatcctttccttgcggaacatgctcctcaacaacttgcaatcctgaaaatcccaagaccatcgccatttactacgccactggagaagactaccttgcagcggatgaaaagcgctggggtcaatattgacgaggttattgaaaatgtcttggctcagcggtgcgacccactggctggctggtgggccctgctgattgaaaaggaacaaaggaaggaaagaaagagagagcgcaagcgtcgggagcgggatgctgaagcaaaaaacattcgtcgtctgagcgctaccagcagtcgcctagaaaagcgatcatcggctttaatggaggtggaggaagaaggcatggggttgcgcgatcgtgggagacgggatagaagaagcttaccatcccagttggcagtgccagatcttcctgcgcttccagaaccgctccctgtattcccaattgaggtgaccacgccaccattgccgctcgacaaagattctatacgatcccacaactcgacgcgacggcgcccagtgcctccgccaaaagacaggcggcgatcacggcccagcatactgcatgttagcgcatcacagccggagttgacacagcatcacggcatcttccggcgtcgcactagtcgtcgtcaccagtatccgatactcagccaactagcgtctctcaaacattggtttgtagagtcggcgaaaagagcgcggtctccccatgccaaatcgacgagctcgcggaagtttctttctgaaaagttgagcccggctaagagtcaagatactgggaaaacccctgcacctttagcgtccccagcaagcgaggtcgcaggggaggatgttgttacacccacccaggcaaaacgagcctccaatgccagcagcctcgctcctagcagtgcctcataccgccaaaaccgccactcttaccctcaccagccgcgcccattgaacaccagtcataatagtcatcgaaactctctctcgccctcacctatcaccccacgcgggtcctatcggcgttcatcggccgggctccgaggtcgcaaatccacatcctcctcggtatcatcgatccgcagcattcaccacgctcgtgctcactccaaggcctcttcgatttcctccaacagtgtggatactatctcgacacccactgccagagcctccaggtcgcctcactcatctatcaaagtgctgcccaccactccaggcgcctcatcccgctttccgagcaatattcggttggtaagagggccaggcggagcacctcgagagttcggtgaccacttaggtcagatgccgtcgtcgttcaacgaagcggtaccagggccactgctctactcaccctcttcaagtctggtgtttgcaaggcgaaagagatctcttttcaagggtcctatgatccataccaccaacttgatggtgtctggtgggatagccaactcctctatgccgggtcagccaatggataccagcgggcctgacctcgcaccagggcggcctgctgcacgcaagagccaaatcatcgaggaagaggaagatgtcgaaggaattgaggaagaaattgaagaagtcgatgagttcgaagaacctactacaccaggaggtttctttacccctgatgagcagccagccgagaccgaatctccctcaagcggcagaacaccatttgatcctatcctaaaccttgataccagtccccttcggcctcctcgctcctcctctttgcgctcgccgtccgataccccagacaagatcggcatcgccgaataatactccacccgacagcttccttgcaatttcccatatgtgcattagattcgggtgttcctttgtccatcccacgatcccttattcctatgtttgttagacgatagagcttttatacccccacttacacagcgtgtttctttttcatttccctttacttgtctctttttcggcataattggatccaccgttggacctatgcctctccctctcttgcgctcttttccttcacatttcctagcttcgtgaagcgctttctcttccctacttctccttgctcctcggtgattcgactctcgcttgattttaatgtcttttgcatagaattcccctgtctcatagaactctgtcccatatcatattgctggattgatcagcaacaaaatacttgcatgatgaaattgcatagacctatccactttgataatccccgagagttcagcttaccacaaactgaccggtgggctggcccacgtgagctccattgtcatggctctagggtggatcgttcctttactggagatgcgaataactatctgataacttgagcgtgaactagtgatattctatgtcgagagccaatatgacatggtaggatagttgctaaagacaaagaatagtacaattcaatgttgatcaatcaaaggataaatacaatcgtatatttatacaataaagattactcttgctttcactcaggcctttggtgagttgtgacaagcctgtccatgggtccgactacaacggtgtttggtatcatttggaatccggcatcggagggatgtcttgaaatctcactctcatttccaaccacccggctggaagttgttgataattatctcaggacttctatcacctgaatatcgaagcagttcacacactcattcaagagtgttatcctagtatcgaccgcatgtctcatcaatggacagatcagcttccatgaggggtctaccacgatgtctgaactgtctcactctttagcgtccaggctccaataatatcatattcataagactatcatcttttatgggggtctctactttacgatatcattcctctccaaggagattatcctctatatgagggattttatatcataacggtgacgactctgacgtcggtttcctaatatcctaccatgttgcctttgtatctaacgtttatacagtggtccatcacacagttagcgacattatccaagaaccaagaataccacccggtccttggcctgtttatccaccttcaaaaggctacagcaacatcgacaccccatctgaatgagtctcctggaaaagagcatctaaagcgacgaggctgtcgatgagcgaaagatttatgcgttcgctatctcactgctaagggggagcttgccaattgcccacgctttatatatatgctagcttctcgggaacgaaacttccgaaattgttgctgtgaaaatgagaatggaagagaaagcgctcaatgcggagatcttggaggaacgcggacattcacccaggcctttggcaagctgggagttcggcttgctctgccacaaattgactagtcgcaactactgggaagactttccacttcttcaagatctcgaatgacttcaacgtacgttatactcaattcgtgatggctattatcctatctaatctatatcagtggtcgtcggtatatgttttgggatatgttttgacgtgcgttcgtgtagcatttccaggccgcttggacttctcgtccatatattctaccgtgccgctatcatatcccctgcatactcggaggagagcttatgccaatccaactagtaagagatatctggtggtagcgccgcttttaagaccgtcgacgaggatgataaaatggaggacttggttgattagcttttatatctggtatcaatttttttcttttcctttttcattttatggtacctttttccatttgagctttgaaaagattatcgatggtttacgcttacgtctatgactcttggatactcaaattagttatggtcatcgcctgttactctataaagagaataatcctaggcatggaaattcaaggaaaatactaacatccattattcattaaccattaccctagaggatataccgaaagcagagcaaatagcaaccattcaccgctctaaatgaacggcttggtgcttctcgtcatcgatatcatgagagtccataacagcctcctcgtctttgatattctgactctcaagaccaacgtcactcccgccaatcctatccacggtatcagtatacgacggaacaaagttcacagcaatagcgtaagtccaagcgacgaccataaactgcaaccagcattagccaccgatctaacagggtagatacggaaacgaaaacaagaaacccccatctaagagcagaacataccatagtcggaacaataaacgcgaatcccgtattatcatgcatatcagcaacatgacccagaataggcggcaccacagcacctccagaaacaccagcaacaataaacccagagccgcgcttgtaatggcgtccgaggccacggattcccagcgccatgatcgtcgggaagcaaacagactcaaagaagagcgtcatgaacagcatagcgagaccaacctgcttggtctgcgtgaccgacgcagcgaggaacgctaccgtgcacgttaaatacagcaggaagacccagcgcgcccgcacgaatttcataatgcccgagccgaaaaatctgccgactgcgaatgcgccctgtgccccagcgaggtacttcgctgctgtggcgctagatgtacccgtccaggtatctttgacgtagttgatgaaatagcctgcgatagcgactgaggaaagagttagcttgatggaatattaagagagaagtataagataaagggtggtaggaaacgcaccctgcgcgcctgtatacgtgaattgcgccagtgtcgcatggaaaagcttgtactgtttccagaaaggcttatcctgctcgtccacatgcgtctgcgtcacctggaaggccatgtcctcgtctgtgacttcgggaatattggagaggaagaatacgccggcgagcaagaaaacgaagaccccgatggcgaggtagacccactgcacgcgctgcagggctgctacatcgtcctctgtctcggtgaagaagacataagagcccagaacggggccgacgactgtgccgattgcattgaaggcctgggcaaagttgattctgatctcagaatagcggggcggaccgcagactaggcagattcaaatgggcagctattaatgtctatgcttaattatctgtggagcatatgaatgtcttaccggttaggtagggattagccgctgtctcaagagaccccagtcccgagccaatgactaatgtggcaccacagaagccgccgaaggattggtttaaacctgcgggccacatgcacagggctccaataccgtataggcacagaccgaagatgaagacggtcttgtagccgtagttgcggaggatccagtttgcgtagccgagggaggctaaggggtatgcgctgggttttgttagagtggtatctttttttataatacatatgttatcgagagattccatacccaaagtaggctgcttgaagaccagctgagcggccacggtcgatatgtagggttttctggaaatgtgagttgagggtgtccagcaaaccatacgcaaagccctaattgaagtcttagtgggaggactggctataaacgagataccgtagcatacccataagaagaataaggtcgtgactagggtcaagggccacagactctgtcgtagagtcagagtagcagcagaagtagtcgcacgattatcaacacgcaagcccgaacggcttttgaggaattccttgacgcccatagtcctcggtatataaaaaagacaaatacaatagagggatcgaatgaccaagcggccaaatggggtatttaaatagaaaacgaaacaaggtgacaccctgatttccccacaagtcaccctttaccccaagtccggggaaagccagacgatccctggggaaagaccagcaacgtccaattacaagtcagaacacggagtttcaccgaggatcgaaggtcactttgattttttccccgctatacacccctggagaggtggcgtcagcgttgcatggttgttttaatgctattcatatttaggctatgcaagttgttctctcccgtgtctggtggaatgccactccgagctatattgagttagtcttactttactatcctagatagtagtctagatgacatcctaaggactatcatacatcctcctattagttcatgagagctatagatgatgatcactttgatagccgtagacaaaagccgtgtctattacagaatcacatgatccatccatgtcgttccaatattggaaagggatctccaagctagacgagggcgtggaatcaagggacaaaccgggcaagatcgacacatcttcgaataagctagtttatctacgaagacacagtacatattgtcctactgtccacaaatacaacaatcacaggttgtaatctttcattcggctgatctatgggcgttcatgatagcagtcataagtaatccacgcactctcgtattcaatgcatggcaaatatctagccaatcaggcaaaatctatctctattacacaccggttagttagctcctgcgcgagcagatatctaggagggtagggtccaatttagacccatcctttatgcccgcttgggcttaccgacggtaccgctctgggcgaccgggttgacggctttcgtgttgtaaagacgacgctcggccaacttaaggacctcgtcaatcaagctggaatgtggattagtaagatattctttcaggattaaggagaaatgacacatacatcacaggtgcactgatcaccaacaccgcctgccattcattccagtccatgggcagaatcgagaacaggttctggaggaagggaatgtagaggatggcaaagtgaaggagcatggacagagtgatagcgtagataagcatggggttgttgcccaggaagaaagtcaggagggactcgctcgaggacagcgcgttcatggcgttgagcatctcaatcaccacgaggatggaaagagacacggtggaggcagatttgcccatatcgttgctgaacatttcgcagccaatctcggggaactgagaggcacacttgtggtagtgggactgaattgacctggttagcaacacgatcaatacctggaaactttagagacttaccaattgcccgaaagagatgccaggaccatcggggttgtagacaaaccaccagacgtagccaaagacggtggcagcaccaacgtagatgccgacaaccatgtagcggaacaacaaccagccgccaacaaggggctcgtcgcgacggcggggagggcgattcatcacatcgtggtccggagggttgaaggacagagcagtggcaggcagaccatcggtaacaaggttgacccacaacagttgaacgggaatcagagcctcgggcattccaagggcagcagtcaggaagatagagacgacctctccaatgttggaagaaatcaggtaacggatgaactgttgagtgttgctgtagatagaacgaccttcctcgacggcgacggtgatggtagcgaagttgtcatcagccaagaccatgtcagaggccatcttggccacatcggttccggtacccatggccacgccaatgtcagccttcttgagagcgggagcgtcattgacaccgtcaccagtcatagcgacgacgtggttcaaagactggaggagatcaacaagcctagacttgtgggtaggctcagtgcgcgagaaaagggaagcggtctgaacggcctgcacctgttcactttcactgagagcgtcgaattcacggcccgtgtagctcttgcccgtgagatcctcgtcggcgccgaacacaccaatggagcgacagatagactcggcggtattgcggttatcaccggtgatgacgataacacgaattccggcggcgtggcatttcttgatagaatcggcaacctcaggccgagggggatccaacattccgacaagaccaatgagagtcatgttctgttccagcttggtgtagtcctcggtggtggtggcgttcttcaggagggggtttccagagacaccgtcaacacttgcgatggccatgacacgaaggccacggttaccatactcaacaacttcctcggaaagaagcttcaagtgattctgagtcacaggaacgcgagatccattggcgccttgaataacgtacgagcaacggtccaggatgctttcaggggcacccttgaccagtaacttttgtgcctcgccttcgccaacgagaacagacatactcttgcggtcacgggagaactcataggtggccttgaggggaagacgggactcgtagtgagcgctggcggcatgcaatttttcggatgtagggaggcgacgaagtttttggttcaaggcgatgtcggtggatccaattttctcaaccagagtacgcagggcgccttcagtgggctcaccgatgctggagaagactccgctcttggcatcgtgggaaagagtagcgccgttgcaaagggcagcaacctcggccaattgtgccacggtcgatgaagaaacggccaggttctcgacaacattgccattctgggtgagcttgccctcgggagtgaaagtagtgccttcgacgtcaatctcctcgaatccagtgccagagctggtcaggtaaacaatcttctcgacgctcatctggttagtagtcaaggttccagtcttgtcagagcaaattacgctgcagctgccaagggtctcgacagagggaagagaccggacgactgcgttcttttgagccatcttgcgggtacccagagccagacaggtggtaatgaccactgccagaccctctgggatagccgccacaccaagagagacagcaatcttcagatagtagatagctcccttagtccagccaccgaacgcggggtcattgaagttctcatagttgataacccaaaccaggacacagatgatggtaataaccttggcgagcatgtcaccgaagtcgttcagcttctttttcaagggggtcggctcggagatctgagaagtgatgctctcgtggatatctccaatggcagtcgagctaccggtcaacacgaccagagccgtagcgtggccgttgacaacggtggtaccagagaaaagcatgttgatctggtcctgcttgacggcctgctcatccttgatagcccgggtctccttcgcaacactttcgctctcaccagtcagaatagcctggtcgacacggaagctgttgctctgaatggcgagcagtcggcagtcggcaggaacacggtcaccgacagcaatttgaatcacgtctccgggaaccagatcttcggccttgacccttcgcgtcattccatcgcggataaccttggcctcgttggcggaatattcctggagagctgaaattgccttttcggcgctactttcttgggtcactccgacaacagcattgaggatgaggatggtaaggatctgtgaacaacagcaaacctcggtcagcataatagaacacatgggtatacagatgcaacgcaggatatccaggcacttacaacagcggggtccacaaatgcggtccaatcgtcgctctcttcaaagagagctagcacaaaagacacggcggccgagccaaggaggataagaaccaattggtccttaaattgttccaaaatcagttcccacatgggagtcgggggttcttccgcaatagctaaataaacggcagatgtcagttttagccatgtcatcattctgcagcggggtgggtactaaccgttcggtccatactgttgtctggaatggaagaccgcgctctgcgacagaccagtctgctccgacaccttgaagtgctccagcgactctgctggagtacggagaaaggcgttctccatgatcgcgacaccctcaacggcaataggcaggatcaattgcaatagccgcagaggtgaggaataatagttggggtaaagaaggaagaaaaaaaatgggtgcctgtttttaagatagttacatgcccggtgtaacacagagtcgggaaagagaagcagcccaaagcgagggacagggttatattaaaaaaaagaagatccaaagcaagcttggaagaaatgaagatcgaccgaatggggaacctccagtgggggaagtcaacgtgttctcatccatttgattccaggcgctgagtaagcatggacctacctgcgtggggagggcgccccgggggtctacagggctgaaggcgggtcacttgcaattctccgcttcgttttctcttctttctcttctatctttctttgattctgccttggattgagtatgaacgtattgaaagtacctgatacttccgagattgactatctttagcataataagtctcactatatcatgaattggagcgaaagcctctggtagggctccaacgtcatgtcaattcccagcttgccctatgggtctctaggctgcatcgtttcttgcctattagatacatgtaggttttgtgggtaacctttgatcttggcaccttcctaacaagatgagtatgcaatcttctaaatcttctaattcgaccaactcgactcctcactactagtgtgatatagatggacttgtgccatgaccacagctcttgacctatactcggttatcccagggctccggagcatactggatccaacctactcggcccacttatggttggcagggctgagatcttcaaggctaaagcacagtccctgctagatgggtcaagtgtggcatcttcataagcacgctaacatacccttgcctgtagggctgaagctagaaacaaaagtccatattgcatcacttagctatagatcatctactcaatgcctttaaaatcgatttaaatccttaccttggctttgaagttggccaaatagtcatttcaagccacttttagtagccacaaatagaagggaaacgaaagtagaaagtctcttgaattttgctatgcattcgccgatcaattgtgatatgattagtctgataattctagttggttaacctttcaagtttgggaataatcaagctgtggaggtaagaatgcatacggagtactccgtacgtgaacaagaaaccaagcgcctgagtgtctggatgcccttttacatgtccattatgtctttgttcaaaccaggtcaaaataatagtaacaaatatagtaagagaataaaaatccctaccttagttccaactcgcttgaccgcaagttatcacatgctcattgaggatccttagatagtatgatagtagttcatgggggagaaatttaacaaatgtccgaataaaagcgattgctaacaatatatttcactagaatacttttagtctgaactacttgaattatttgaataagactagaatacttgtgatacaacacctaatcttagtgtgtggccgatcaactacatcataaccgaccctattgtctggaaggttctaagagatttgcatcattatcatccccagactcttgcaatgccactgtgatttcactaaaatggaaataaagtggtctctacctcagcacctccagggctagaatggtgtcagttaggtatcggtcggagtccctatgacaaggtagtatggctccatagatacacaaaggggtgtctaggtacgaatcagctagaatcaagccatatatcatactagtccagtctcccgatgtcctgaaaaggagagtcctagtctaatattagcagtacttggtaatgaatacggtcatttataccccaccccgctcaaatgaattccttgttagggggatcgaccgtaaaatgaatactgggccgcggcccaagtaccgtagtacttccacagagcggtgccacaatagggggaagcaggtaccgggtacaagaggacatcgtattattgttatgatccaaatccccccaactcacttcacatcatctctctcccccacttggtcgtctctacccatcttcttctcctgcatctcgcgtctcctactcctttattttaagtctcaagttctaaccacctcgattcaatttcacaatgggttctgaggtacgtggctgtccccttctatcggctgtctcgagttgtcaccgccatcgcaatcccacattcccatcctcatctgagctcacccccatctggaatttttgttgataagaaccgggctaacgagtatcgtaactatgcagcgtgagaagtatgcccatcgtcgcccctatttctgaaacctcgtggcatgactgaccccctcaccagcaagacgttcctcgcgcggctctgcgagcaggccgagcgctacgatggtaagttgacatgcgatggtttggctggatggatatgctgacatgttgcttcttgcttgacagaaatggtcaccttcatgaaggttagtcgcaccctctcgtgttgtttactgagtatccatgctaattgctgaacaggaagtcgccaacgtatgacaccatcattttcccatcacttttgggaccactttgggggtattcgaaattgacacatttctagattggtggcgagctcactgtcgatgagcgtaacctgctttccgttgcctacaagaacgtggtcggtacccgccgtgcctcctggcgcatcatttcctccatcgagcagaaggaggaaaacaagggctccgaggagcacgtcggcatcatccgcgattaccgccagaagattgaaaccgagctggagcaggtgtgccaggatgtgcttgatgttcttgatgaggctctcatccccaaggccgagactggagagtccaaggtcttctactacaagatgtacgtctccaacgaaatttgctttcggtctgttacattttgctgactttgtaaacaggaagggtgattaccaccgctacctcgccgagttcgcttccggccccaagcgcaagggtgccgccaccgctgcccacgaggcctacaaggtaaacaattctcatttcggcttattgtcataggccttctctctttgcaatgaacagttgttgatcgtgtcatagaacgccaccgatgttgcccagaccgaactcactcccactcaccctatccgcctgggtcttgccctgaacttctccgttttctactacgagatcctcaactcgcctgatcgtgcttgccacctcgccaagcaggcattcgacgatgccattgcagagctcgactcgctctccgaggaaagctaccgcgatagcactttgatcatgcagctgctgcgcgacaacctgaccctctggacctcatctgagggcaccgaggccgagagtgccgccaaggaagagaagtccgaggaggagaccgctgctcctgctgttgctgccaccgaggccgctgctcccgccgaggagaagcccgaggaggctaagcccgtcgagactgaagcctaaaggaacattaggggtcgcgacgagccgtatgccgtttggtagggtgggcgttcgcatttattcctggacgtggttatgcaagtcgcttctttgttttcactgcagcgctgggttggaccggcagatatcttgcacgtcttcgggaccgtgtgggtcggccggcggagtttgatattcggttgacgcgagcggaaaaggggctgagtggaaatttctctctcttttattgtctctattcccactccagcacgtttcaatgtgtttattttccattccacccgagcttctctacttgacatgcaccctgtgttaggttgcttgcgtagccaatgattccccttttaccagtattcatgactgaagtataagccgatagagtaaacctagttattcctttattcctttcactcgactcgctggttgattagtcctaaagccttgacgaacacagatatctacagatgagcatgtgcattaatgcttcgaagttaaccaaattcccactgtcttcccctatattgcttacccaaagctgccatcatcctcagacacatctgaggctcatctctaggaaaataccggcacgcccccacctccaaagcaaagacaccggcacgtccgacaattccaacaactaaaaagcgccacagaagacgccatcccatcaagcaccgaagacgcagaaccaacaccatcggggaccaacatccctcgaacgattcgtcggagccaagagccggacagcaacaccaccgggcccaatgcggctctaacaatccccaacccgctatttcccattctcgaagtgaactcaaccgaaacacacgtcttcccaccaacgaagagtagccaatcgaaaccggacgttttgagcgccacgggagggtccgggcacttgcttgaatatgacagctgggcaggcgggcatcacattgcatgcaatgcatactgcaatcgtggtgtggtgacaggagagtgggggaatgccacgagggcgaaacggcggtgttggcgaattgtggctggaggggttgaggatgcgattggttttgttggttgatccctgcgtgtgtgttatcttactctctttgtggtataggtggactggcgaagtttgtttcacttaaggattgcatactcgctaggttttgtgtctgcagcgagtcagatgggtgttatagagtatgtgtttttttggatgttctgagtatatggcacaatgtcgattgatatagatcgaatttgtcatgaagcctttattcaatgattttgacttgtgttggtcccagagcctcatatcagggctcttaacggtcctatttgtttgcttagttcttggcaacagctgggatgaatgcaagctcttcttgtcgatcttttctaccgacctgtttctaatgaaaccgattgaagatgagcagaaagtctgaagtctacgatgtcggtaaatgatttaaatttagattccaatatatagttagatgaagatgcaacttgaagagacctgacaggtatcattttggtgaatgaaattgagcatgtagtcgctgtacgaagatctcctgtatcatcttccataggtagacacagacacatgaccaagccaacaaatcctagttcattgcacttgcatacatatgtatgtagtatgcacagctacatcaccccagttatacggaccctatcatgcaagtagagattgggcagatgcattaggattagaatctcgtctagagaacctttctcgattgcccccggcatgcatccgactccatgccatcgggatattccaaagatccgcgggatgtacgaggtaaaagcaatgcacatagtcaattccacatcttcccgcaacgcgttatataaaataacgccgaggacaccaaaactacacaaaatcttcatcttaagcagtcttttataacaagaaaccccaaaagaacaatccaatccaatccactataataaccaaaagtcccaaacaatgtcactcccacaacccctgcccctcgaaccagacgccctctacatcctcctcctcgacctaggcggcagctgcctcttcgaatggagactatacctcgcgtcaacgcacacaaccggccaaaccttccacataaccaacgagacaggcccagtaaactggcaatacaaaagcgaagccgtgtacaacatagcaagcgacatgcgggtggtgctagcgctgcaaattggcgtcgtcgggcccgtgctgcacgccgcgctggggtcacgtctggcactcatcccgctgacgctgtactcggctcggttccgggagggcctttcttgccgcgtgtgggtgcaggaggggctttttgcgttggatgatgagggatatctggatcttaccaggagtgttgcggatatcgagcaggaggctagacagcttgggatgctgaataaaagtcgggggtctaggtcggtggttaggagtagggggtttgtgggttgaatttatgattgtaatgggtggttattagctgtgggggttgtcatgatgtatgtgaagtcatgtaataatcggaatggattgggtctttctttctatgggttacttgtgcccaagcatttgagataggaggggatgtacagagcgatgttgtggaaaagtagaagaaaaaatagaaggggtaacattggacccggcagagataacctgcatataggtgaggcagaaatagaagatgtagatcttccttttaaggtgcgtattttcaagggatcaggggggaaaagcgaaacaattcaaatggagactggtcgtccgtattcacattcacataaagtcatcatccccaagatcatcaccaccctcgtagttggtgtgatcgacctggctgtcgcggctggcgttcagcgagatcttggtctttgccgccttggacttcttattgcccttgtcagaagcacgctcctcgcgcatcttctcgttggaagcagtagtgagagcactagcaatcttcttgatctcagcactaggcaagtccttcacaagcttacgggtgaagtcctgcgcccagagagagtagtggggcttcttggagtgcaaggtgaggagcggcacgagggtatcactcagacgggcgaactggtccttggtgacgggcttgaacagcggcatggcggacagatcgacggccttggtaggatcggttgagtcgctgacaacgacggccttgggggcgcccttgttgcgcttgagatcaacagtgccgaaaagatcctcggcgtgggcaagatcggcttcctgctcggtcgcgcgcagacgagcgcggcggtctgcctcgtcttcactctcagattcgccgctgccctgttcccgtaggcgctgtagccggagttcctctatccgctgggctttggtcttcttgttggcggcggcgacggccttggccttggcttcggcttcggcggccttcttggccttctcgcgctctacctcggaatcttcggcggcatcccatgagtcaagaacctatattcggggttgttagtttgttgttccttggcgcgaaggtgaggggcctgctggacaggttcgaggttgcgttgccttacatcttcttcctcttcgtcatcgaaacggcggcgaggcgcggcaacaataggaggaggcgcggagctctcctcttcttcttcatctgcgtgagatcaaaaagattagcaacagcaacatgaaccaaaacacgagctaagtaactgtggcaatcgctatagaaggataatacaaggataataacataccccacttggaaggcggcattttgagcaatctaaaaactcgttgatacgaaagaaatgaaggaacgtaatgcgctacacgcaaggccaaaaggaacaagccaacaacaggacccagcaatggaggggcgagggcaaattttatgtgggacacacttatcgtccccaggtgggatgttcacgtgatctcgggcattggatgcccgatgagcatgatctttgttcgtatcccatacatataggctgttcatttacttatttctaacttatcaggtggtggaaatttgttttcattgaaaaagatcctattaaattcataatcatcatgggcgatggctccgtagatcgtccaaccatcgtttttgatgggccctcatcaggcccgatctatgctgccgaaaggcggcatttacaggttgacagcagtgcggaacttctcgccagcgtagatagcgttggcaccaagctcctcctcaatacggaggatctggttgagcttggcaagacgctcggagcgggcaggggcaccggtcttgatctgaccggcgcggaggccaacggcgatgtcagcaatggtgacatcctcggtctcaccggagcggtgggagaccatgacaccccagccgtcggcgtaggagtccttggcagcctggatagactcggtcaaggtaccaatctggttgaccttcaggagaagggcgttgcaggacttgagctcaatggccttcttgatgcgcagagggttggtgacagtcaagtcatcaccgacaatctggaagtcagaggtcttgtagaagtagctccaggcctcccagtcgtcctcagcgaaggggtcctcgatggagacaatggggtacttggcagcgagcgacttgtagaggtcggcaagctgctcgtaggtgagccacttggtggggtcgctctcggggttcttgaagtcaagatcgtacttcttctcgtccaccttgtagaactcgctggaggcaacatccatggcaatcttgatctgcccagtgtaaccagcctgctcaatggcctcggtgatgaggtccagagcctcctcggcagtctgaatatcgggagcgacaccaccctcgtcaccgacgttaccggcagactgaccgtacttcttcttggcgagatccttgagcttgtggtaaacctcggtaccctggcggagaccctcggagaaagtgggagcggtactgtatttggtcagtttatagttgcaataaattcaaggctggaggacctactcgggcacaatcatgaactcctggaaggcgagacggccaccggcgtgggagccaccgttcaggacgttctggaagggaacggggaggacgtagggcttcttggttccggcaaggtcggagatgtgagcgtagagggggacacccttctcagcggcgccagccttggcaacagccagggagacaccgaggatggcgttggcaccgagcttgcccttgttgggggttccatcgagcttgttcaggaactcgtcgaccttggcctggtccttaacatcgatgttctccttgatgagggcggggccaatgatgtcgttgacgttcttgacggccttgaggacacctaatttgagatgaggatatcagtttctgatcactttagaggtgtcaaccgggttcattcacttacccttaccaccccacttggtcttgtcaccatcgcggagctcaacggcctcgtgctggcctaggagtgaatgttagcattgaggtcctttttcccctttttaccatctagacttcaaggacaacataccagtggaagcaccggagggaacaatggcgcggtgaaggccggtctcggtaacaacatccacctcaacggtggggttgccgcgcgagtcgtacacggagcgagcgtggatcttagagataggcatgttgtaattggacaggctgatgatagattcagtcagttgtaagaaaggagaaaaagcagatatgggctgatatatggcaaaagctgcaggtgactaacggcgggggaagttcaccgatgacccaaaaagattgggcgggagaggtgagaaggatatgatttgcttggagagagctcaacgaggggcaagttcctactacgatcaccgggaggcctttggttgggtttctgttcctttccagaagacttgggagggttgtagcaggtcgttggagggggatatgtgtactttggaggggtagatgatggtgttatggtggggtatatgatgttatggtggttatgatgcgatgatgctatattcagatactcacctgttaaatcagaacaacttgataaataaaaggagacctcctacggacacacccgactacttaaatactttcccccagagaaaccccgggaaagctcattgctgctccgattctttccaatgcaacagtggggctccacggccgctctccagtactcgctggctggtccgaccttatgcggcctccttagctacgagatctcccgtccctcggaagatattagactatgatggcatcccgttctcccgattgccttccttgttataggacgtgcacatcgtacggcatacccctctacccctctattgcgcattagtctaactgcaggattgtttactgttgtctagaccgatgttaccttcagggctacgtggttcgaaacagaaagtggtcatcttacgtagcattcattcgtgttcattcgcattcattcgcattccttccaaggttccactctgactctggcgaaccttggaagacagcagttggcgcctgattgctaaggccaagctgtctcggaccgagttccgggctaatgatcttcctttccgggcagtttccattatcaattcataaccagaagggaaacgaggactggttggacagtataaaggaaaaaccacaagatataggcaatgcatagagaccaaagggagaagaaaaggcccaaaagaactgaaagtagaggtcaaacagatggaggctgaataaatagggaatccaattccaaggtcatcatcaccacatttatcaagtcttattacatacaagaatagcttgggttcttgaattcaaacttgtcaaacttattgccttacgctcaaggctgtgagagcgttcctgccttaggtgtctgttatgacataagacaactcggaggtcatgtgatcgtctcaatggacgccgcgctggaagctggaagctccccaggcaaggtgctatcttcctaatcacgatatccatccatttcgcatcgaccttatacgaaaccctggattcatactcgaattacagtctttctctggctaccatcccaactcgtccacactcggtgaatctatcgttcgtccgtccttaatcatgagcgacccggagcgcggccaggcgctcgaggaatataaaaagagcttgctcgagctacgagaatgggaggccaagttgaaaacccttcgcttgggtatcaaggatcttcaaagagagtttgatgtctccgaggataacatcaaggcactacaaagtgttggtcagatcatcggcgaggtgctgaaacagctcgacgaagagcgatgtaagtatccaaggctcaagatattcgtttcaatgatcgcattaagaagctaatccgctgtacagtcatcgtcaaggcgtcctcgggtcctcgatatgtggtcggttgtcgttcaaaggtggataagtccaagatgaagcaaggcacacgtgtggccttggatatgacaacactcaccatcatgcggatgctgcctcgtgaagttgaccccatggtgtacagcatgtctttggaagatccagggtccgtcagcttcgctggtatcggtggtctgaacgaccagatcagagagctccgtgaggtcatcgaactacctctgaagaatccagaactcttcatcagagttggaattaagccccccaagggtgttctcctctacggtcctccgggtactggtaagacgctgcttgcacgagcagtggccagctcgatagagaccaacttcttgaagggtatgttcaacttctgaaagcatttacagctgcgatgttctgaccggtctactctcctcagttgtatcctcggccatcgtggacaaatatatcggtgaatccgctcgactgatccgagagatgttcggatacgccaaggaacacgagccctgcattattttcatggacgagatcgatgccattggtggacgacgattctcagagggcacatccgcagatcgagaaattcagcggacgctcatggagttactgaaccagctggacggtttcgactacctaggaaagacaaagatcatcatggccaccaaccgacccgatacactagaccctgccctgctgcgtgccggtcgtctggaccgcaagatcgagattcctctccccaatgaggttggccgtctggagatcttgaagatccacacaagcacagtccaacaggaaggagatatcgactttgagagtgtggtcaagatgagcgatggtcttaacggtgctgatctccgaaacgtggttactgaagcgtgagtgacaaatcttccttcataatatgcgtgtactcgttggctaactctttattagtggtctgttcgcgatcaaggattaccgtgacgctatcaaccaggatgacatgaacaaggctgtacggaaggtggccgaggcgaagaagctggagggcaagcttgagtatcagaagctgtaattgtatctaccttgcggggctggtggcccacatcatctggtgcacggtttagatctttgtcttgaagcgctaatgctatgcattcgacctattcttctattgttgattcaagtactccgtagatcaggggatcttaggaacaacaacttgcctaagtaacagttaaaaaagaagctacttcgagaaaaaatgaaggaccttgggttcgattggtagctcgatgccctgttcatttatgtactcattatatagctatgaggccggttacgcgtacaatgcgatatgatttgcggacccctagtgttgcctctccacttccccagcttccttcaacctgcccttgccacgttctcggttttcgcgccaatttcgtctcgaattagattgaaagcttgttgcgacacttggcgtttatctaccttagcattacccaggacacgcgggataaactccgcgctccgcatctccgcagagaaattctttacggacaacgaaaccaccaaacaaaactgtatcggtgcatgttggcttttagatccgagagaccagattgtctttgcgatcgacacttgttcattacaatcgcgccggaaagggttgtactccggtaagtgtgcaggtctggcccgaggggttagctcctcgtcccccaggctgaggatcaaacctgactaactgttgcaagatacgcgtgtatgaaccttgatatagaatcttaatcaacaccaaacaaggcgaatcctccgatagcacctctacctcctcctgctcactcccatgttgcgcactcggtaatcgcaagaccggcagacaagagaccagatcgaagagaacaatggcctaccagccatcgcgcagtcccttcgcgcccgcgcaacaagacggcttctacggaaaccctcgtagtgggctccgcggatacgggctgtcgaaccagcctatccccctgtccaataaagtgaacggctacttcgaaaaggaccgcacactacctttatacaaagataagccgttctttgcgccgcggcgcacgggtcctcgaaggagatggaagccgttcctcaacgtgctaggggtgtgtacagtcttattcttgttgtattataacttctaccttcgcacgtggtcagggctacagtcaaatgacaagggggccgaattatggaaatgggcccagacattagaggatgggaaatcttctggggacttgtctgactggactgcaagacgagagaaagtgcgggacgccttcatcgtcagttgggaaggatatgagaagaacgcatggggtaagtcatacagtatccttgtgtgctatgatagcagctgacaccattatccagggtacgatcagtatcgcccagtatcgaatgttaatcaggcagacacgagcggcgggctaggctggatgataattgactccctggacacattgatgatcatgaatctgacctccaaggtccatcgcgcgcggcaatggatctcaacatcgttgaattatgatcaggaccgtgatgttaatacgttcgagacgactatccgcatgctgggtggcttgctgtctgcgcactatctgtcaacccaatatcctgatttggcacccctcaacgacgatgatgtcggtgctgccggtgaagacttgtacattgagaaagcagctgatctcgccgagcggctaatcggggcctttgagtctccaagcggtatcccatggtcgaatgtcaatctcaacacgtcagaaggtgttgtcgtgcatttcgacgagggggctacgtctattgccgaggctggttcagtacaacttgaattcaagtatttggccaagctgactggcgaggccgaatattggaaattggtcgaaagaacgatgaagctggttgacctacaaaagccacaggacggccttgtccgaaccgccatccatcctgacagcggtgcattcaaaggagacagcattagtctgggtagtaagactgattcttactacggtatgttgatagtacttggtgcccgtagttctttcaagctgactcgctctagaatatctcatcaagcaatacctgcagacctcagaacaggagcccgtctacaaagaaatgtgggatgaagcattgagaggcatccgcaagcacctagtctcattcaccaagaacgctcagctgatgattatcggcgaacggccccagggcctaggccaggaactgttacccagaatggaccacctagtctgcttcatgcctggcacaatcgcactcggtgcgacaggtggccagcccttatcccaagcccgaaagtcagcggattggactcaacagcgcgaggacgagatcctcatgtccagagaattaatgaagacctgctgggcaatgcaccaggccacggcaaccggcctcgcagccgagatctcccacttcgtcttagactcgccgcctgtgatgatggcagacaagtaccccgatccagtggcaaaccccaaccacgcatccaagcccgagatactgcgcggcatttcccagccactagaggcgcaaagcgatgggtccgagccctggcgtgcggacatcgacatccgccgcaacgaccgacacaatctacaacgcccggaaaccgtcgagtccctcttctatctctatcgtatcaccggcgacgacatctaccgccaatggggctgggagattttcaaatctttcatcaaacacacagccgtggttgaaaagaaaagtacctcctcgcgtattccgacatcaaccaagacagcacctgttttccgtatcaagggctttacgtcgcttggaaacgtggatgcagtcccttcatacaagcgcgataacatggagagctattggatggctgagacgcttaagtatttctatttgttgttctcggatcgggatttcatctcactggaggaccacgttttcaatactgaggcgcatccattcccgcggtttaagcctagtggggatctaaagacggggtgggagagagcgcctagaaagtagatttcgtgggcgctttgttctaatggagccttggttggctatgttttgatgtctcttatatgttccgtatagcgcttttttccgtgcttttcctttgccctctggggaaacctagatttgtataccaacatgctgtacatggccgatgttactttctgaaagcaatactccttgttcacattagcattttatatgtaaggtaaaatcacctctattctgctgggacttgaaataacccaatggcgggacctagtaaccgaaattatgtgaacatagctccagataccacacccctaccagatgatatacaactagaaatcaatcatacaaccacctcgcccttagcctctctttccagcgcagcctcaatcaactttttataaccaaccacagcctccttgatctggcggacagtcaaggcctcattatcaccatgagcaacaaagatacttccaggcccatacaagtagcgcttgacaccagggccgacagccagattcggcacatcagtaccgtagttaacagtcgtaacatcaaacccatcaacatcaacatccaaatcctgcggcgggtaagactcgccatgcgaaacaaagtccacaacaacctccgcctcgaaaccccgaaccgcctcctcaacggcgcgctggataatctcacccgcctcagcaggcgttccagcggcaagtctcacagcaacatccgcccacgcctcagaaggaacgacattcgtcgcgacgccagcgcggataacgccaatattcagcgtcgtcggcccgtacttcggggaggcaggcaggccgccctcttcggtggggatatcgccgagcacgtcgacgcgcgagagcgcaggcagaatcgctgacacggcgctcttgcccagccatgggtatcctgagtgggcggcgctgccgtgcgcaaggaccttgaagccgagcatgcctttgtggccggcaacgagggctgcctcggttggctcgccgaagatgatggtgtttatggcgcttttcgcgttgaggcttgagtccgagaagagtttcatgccatcgccgccgatttcttcgccgaccacgaagagaaggccgagcttggcgtctggttgtgaggctagggtttcgagggttgcgaagatttgggctgcgacgctgccctttgcgtcgacggagccgcggcctgctatgatgaggttctctgggtcgaaggtggtggagtcggagatgggctggtgcacggagtatgggatgaagggcgggactgtgtcgatgtggcttgtgaggaggattgaggggggttgtgtgtaggattttggaacagcgtagatgttgtagcgcgtcttggttttctcttggtccttcactgggggcacctcttgcttcaccacggtgaagttccgggcctccaggaactgcgcgacgaagaggccgacatcgtgctcgttaccggagagtgactcgatctcgaccaggtctcggtggaacgacagtagaggtgaactgctgattatatcatctaggcctgtttggctgtagctgggctgggaggaggatggcacgcccaggagatgttgctgaagtgcggggtgcggagaagcctggacgccggaaatgatggccgcagccacgagatatgaagagagcttcattggaaggtcggggtacaaatatgttccaattgttaatttgctgtgtccaatgcaattgaacagcccctacgccctgaacgttgagtgttttgcgaagcttgtagatcggagatccgaggtcggccccgatgtatacggtcacgtggatagataaacatatcgaccggctcgtcctattggccacatattatcaggtctgtggtgctcgttattgcgtgatggattcaatgtcagatacaatgccagatacaatgccagatacaatgccagatgccttcattcacgtctatttcattcggcaaattcctaacccgacaacatatgtatagctcgtattcgttaggcgagctggcccacccagacgcgccgattaattcaagtcccgaagctctacaaatttagcagaacaccgagtggatattattggatattattggctgtccaagctttcctagaacaaggaaatcactttgattcgtgaaagtacatagcacagtctaacgctccgaagctaaattaattgtctccgatttaaacgggtagctcgtgttaatggatacactcgcgattcccgggtttaaaagtgatctccgtgcatattcacttcttataatcctatactagtgaaaccggcctcaccgaggctatgagcgtcattgggctcgatgctttcaaaagtactagaatagtgttggcacgacgatccaaaaacacagccctcggactacacatctcagccagccacatactacttctatgatcagccctacaactcagttgggttaacacatttcagctgggtatttttaaaacttaatacatacatattcggtttcgaacactaaccttagtgaataaagccgacaccgaaatcgtttgtacgcagagagaactacgtcgacgggcttcgcgaatcaaagctttacttttaacaggaccacaacgctcacccggtctatccgatcgtgtattgaaccaatttgccaaaggctgctagcttgtaatgtatagcgctattttattgggggaggaaggaatcacatatgtaccagctgaaaacgaagagaagtaaaagtggaccggatatagaacggaaatacccacctacccacccagggagggagccctatcgactcaagaagcttctaaatagattaccgaacaggtggaactcgttggtggaagcaattgaaccatcccccccctcccccctgcctggcatgcatggagaaccggaatctgctctagaaccacatacgcgctgaacccaggcgtagttggtgtcagataacagaggatagaataaataggtgtccagatagatattcattctagtttaattaatttgatggcgtttaggtgaaatctatatctcaaatccaacggctttggttgggtaaccatctcgcttattggatacgtttataagatctttagtacccagatatccacctcgtatagccctgtgtcgttatctacggagtactccgtatgttttatagaatcaatgttataccggggtatcttattgcgcacattcacgagggatatgagctggaaacctgcaatgatgtatgatcgacatgcaccatcacaacttggcatacttgaaaattgtgagttcagctcgttgttctgtattggacccacctgtcagtcagatattcacgttcccgatgaagcccggcactgatggcccgggagcgcggatgggttcgatcgttatgaagccaaaataaagcatactaatgctcggtaccgcgaatacgccccaggtggggatgagactaatgccataggagcaatgatctacgcgttcatgcttgtcacttcatatattatacatcgtatgtggtacatagtgacaataatgaacggtgattggcacatcggtgatatgtttccaggtgatataaatatggatgcccccttcagatgagtatttctaacacagcattcttactacgttagtttacttgcttcctgacatccgaatcattcatcctaagcaagaacatggaatcttttcggaaaagactgcttgcgacaacgatcgatgagcaggctgaaaccaaacccactcaacgatttgcagttatttcacagggattggacctcagcaatgggctccgagacatttcaatcaaagacctggcacaggccgtgaacttcatgtgttggtggattgagagcatcattggaccggcacactctgactccccagagacggtggcctatatggggggcaacgatgtgcgctatctcatcttctttcttgcatgccagaagactggatatcaggtaaggaaacatgccactcaaactgagaatagaacagccggactgactcttataggccttcttgccttctaccaggaactcagacgaagcgtatgttcatctactgagcgcgataaactgcacaaagttcttcttcggcgaggagcgtcaagaacgagtactggagatacatggacttgtaccgaaattggacatcttccaggccccgaccctgaacacaatcctcagcgacgagagtggtctacgccactacccatataccaagtcctatgccgatgcagaggatgacattgtttgcatcatccatagctctggaacgacaggtaaatcccatgaacgtggcactgtgactatgaaccaagctaattcccgacaggcatgcccaagccggtgtatctcaccaacggcttcatcatgacctttgattctgtcacttaccttgaaaagccaccaggtcgccggccaaatacattccacgacctggatcaaagtcagctgctgctggccgcggcacctttcttccatctgatgggactagtaacattcatcttctcggtgtggaacgaatgtcccatgttcgttgcccccgataagccactctctgtcgactatatgatagagctgctgagcactggccaccccacagtcgcactcctgccaccctcggtcctggaagatatgagccaatccgagaaagcactagctagtttgaaagaagtcaaaaaagtgtatttcgccggcgcgcctctgcccctagagatcggcgagaaattgcgcaagtatacggagatcataacggtaattggaagcagtgaggccggcgtgatcccagggctaataccggaggacaaaaccaactggggctacttcgaatggaatgaagactacggagtggaaatgcaagacaccggcggcggcgtgttcgagttggtgattcctcggaagaaggattctcgcgactggaaggccgttttccacacatatcccgagctcgatgcgtatccaaccaacgatctcttcacccaacacccaacggacccacgtctgtggaagttctgcgggcgcaaggacgatgtgattgtcctcagcaatggcgaaaagtttaatcctatcgggatggagggtatcatcgagggacacccgctggttcggaaggcggtggtagtcggccagtcccggttccaggccggactgctcgtcgatccgagtcctgcgggatgggatatggacccgaaggtctttattgaggagatctggccggtagtacaggcggctaaccagaccatcgcggctcatggccgggtaatgaagaacaagatcaggctcgctgtgaagacaaagccattccagacgactcctaagggtaacgtgcggcgccggatggtgcttcaggactacgaggaagagattgatatgatatataccgaggacctcgtggatgacttggaccagtctctaccgcagacgttagaccatgagagtcttacggagtatatccgccaggttattacccgtgtcctggagaaacccgagatcgcagatgatcaggacttttacgctgccggtcttgattctctaatgaccattcatgcctctcggatactgcaaaagggcattcagctacgtcggccggatgtagaagcaggagccatcaacgcccagacgatctatggcaaccccacagtcgaccgattgtctcaatccgtgatggacatcttagatggaagagcccaagctgatatcccgcgagcagagaagatcaagagtctgctggagaagtatacgtctgatcttccagtgcgggaagtctaccgcgagaatggattgccctcgccttcgactgtgattctgaccggttcaactggctcactgggtacttatctcctgcatgatctactaaacagcgattccatcaccaagatctactgcctcaatcgttcggatgccgaagcacgacagaagaaaggcttcgaagaaaaaggcttacacttcgacgaaaacgactggaaagacaaggtcgagttcctacaagtctcattcggagaaccacaattcggcctggacgagtccaagtaccaggaacttctcgactcggtcgacaccatcatccacaacgcctggaaagtcgacttcaaccactccgtcgattcgttcgagggcactcacatccggggtgtgcggcgctttatcgacttcagcttgaacagccgcaacaacgcccatgttcacttcgtctcctccatcagcacggtaggcgcttggacccccgacaagggagatctggtcccagaagtaccgatcgacgacatttcagtcgttctctcacagggctacggcgagtccaagcacattgccgagcgcatctgtctcgaggcatcgcaaagatctcaagtccccacgtcggtacatcgcgtcggacagatcgcgggaccgactagcgcgcgcggacagtggaatcgacaggaatggctgccgacgatcattgcgacgtcaaaagcgatgggtaaaatccccgaccaactcggctcggtcgcggtcgattgggtcccagtggtaagtcccccggaaattatgattcactagctcagccaagagaaaaaaattttaattttctaacttgattttaggacacactatccaatattatagtggaaattgtcaacacacgtcatcgggactcctccgaagcaagatctgccgtgtttcatctcaccaatcccgagcagacatcatggtcgacgttgatcccggcggtccagagcgagtatgcagtcgagccagttgcgttctcgaggtggcttggcgagctggagagtatcaccaatcccagcagtgaggaagttgcctccaagccggcactcaagctgctgggtttctaccgggggttggaaggcgagggcagtgccttgtctgtaccgctggatgtccagcggacgaaagcggcaagtgccagcatgagagcgctgggcgcggtctctccctcgttgatgcgaaactggctgcagcaatggcaattctgattaatatagcttatattggattatatctcgaattaatttatctcatgtccacggtgtatattgcttccaaggttatcgtaaggcttgaacatgacataagtcgtgactgtgcgcgaccggagcttcctcattgggtgattacctcagaaacccacccgattaggtttctttttcgcttggctgggtcggcttttgctatttgccgagcggctgtgattggtctgcagactcgggctatgccctttttgggctgcagggtggtctgttcggtgctagttctctgcagggatgccttagcgagcgatgcgatcggagagatctccaggggcaaaaagaagaacgaaaggatttgatatatcttgatctgtcaacagatatcgcaacaagcgacatgtcgcccgaagaatcaaaatcgacttatcgagcgtatcttcagggctgacaacctatctgtcgccctgaacaagcccgatcccccgatcgccgcgccaaggctcgcctcccaacccccaaaggcacacccggcgggcagaagcagtggcgccaaacaccatggttctcttcccttttccccttctcgcccctccaatcattgcaacatatgatatgatggaatgttccccgaattccccgagaacgttggttcgagccatgtggacctgacgtctgccaaaggggactttgcctttttctttctctttcccctacctctcccatggtacggccttgggtacctattcatattttgatgggattatgattggatgttctttcatctagtactacttgcggttgtatggaggtagtgctctgatgtctagtccaggtctagttcggagttcaagtttatcgtaggacggacagcaatatgatagtatacatcattccgtgccctagttatgtggtatataatttttcgaaccgataaccctccattgtgcgacccaactcgtcatactcggacaaagttctgacctccacgggacggggccttgtccgcggttgctcaacgttgtcggagctctacaacgtacatatacaactacaacatacaaacggggtggatgcaccagtccgtgcgtaggagtatacccggttattcgttgaaggataaccgagtacggagtaaacagacaagaatagctggagcggatgtatccaacaccttttccccccaatcctgcaaagcgaatcagcaccgatcgactgggtcgcaatggcatcataaatggttcccctcttgcatccacatcagtctagattgccgatcgcacacacagggattttggatggagtccggagtattcaattgagaaaagggtcctggaggaggggatgtagaacacattgggctacacggcatatctgtgtagccgttgggggtggtttgaaaaacaatcgaattagaagggatcgtacattgagtccttacgaagttacaacataacatgcatggataaatataaatctaaatatgaaaataaaaataaaagaataaagaatccttccagactctgctgctaccatggttcaagctgtgtcaaccaccggaactagacggagcgaaccttgggaaaagaccttttggatcggcaacggtcaatttgggtttagtcaccttttctttttttttcttttttttttttctttctttgggaatccgatggaattctccactgacagttgtttggtctagagccaacaacatcctctcgattcctatttccctttctcacatatctcctcttcatcttcatatattcatctctgtatccattccatatatccatcccatctgtcctgctctacaaaacaaagccagaaactgtacgacccaggatctccctgttcccttccccagtccgtttgccgatgtaagcaaaagcaccgaaacctctctttctgcccagccagttagtctcatcaacttgtttggtccacgtcgctcgggggaattcattttcgttttctttttcccttttctgtatttcgaatttctgtatttttggcagccctgcctggacgataatcgacatttccccgtcttcatcggatgctaactggtagaccctcagttcccgcgtttcccggactattactactactatctttccatcacaccgccacgtcctttcccgcccaaaaggccattgagggaatgacttgttcaaactgagcgttgtctctcttttatattgtggccacccctcgcatccaatgctgaacggcaacaaatccctatataccagccaccccgtccaagcggcgctcacctcgtgagaatgtacaaactgtctcaaattatcgacgcgacacgagaaagtctcgacgcgctcgaatcgcctctacgccagccgcactctccattgactattaatacctccgcgccggcctcgcctgctgtttctttgttctccgccgcaggccacaaccgggtctccagctcggtctcgtccttggtctcttcgtccggtctggggaactcaatggacagttccagtcggagtcagttgaccggagtcaaggaagaggattgcacacgcgactcattggaagatcattatttccgtatgtgcctatcgccaaaactcccccgatatgcagttgctaaccagaccttctatagaacactttgatcgcatgtctgcggcagattcatacttttctcccatcgataactcagatacctacgatctaagtgtcactggcatggagactgccccatcaccgaaaaagaggcgttccggctcagacactatgtcattaaagggcgtctcgcgcattaactcgcacatctcaaccatgtcagcccggtggaagactaagcgatcctccagtggtgatggcgatacgttcccggatgctctacggtctcgcgcgaactccgcggcctcctccgccttggcaagtcccaccactgggcctgtacctgtgagccgggtcgactctattcccccttctcccgcgcgaaccattttcgaggagcgcgcgagcgagtcgagcgtgcgcccaattgatatcacccgcgcgaacagtctcagccaggacgacaacgatgtgcagcaagcgacaacccctctcctgccaccatttatgagagacgacccaatgagcaatgcgtcccgcgtccagtcacctctgcagtctccgtcagtcgcagatgcgagtgaagcagcgtactataactataatgtgacctcggacccgcggtttatgggaaatcttccctccccaccactctcgtccaagccttctgtggcctccttcaaccggccacgagccagtaccgtgcgcacagtctcaggcgatgtaacgcccctcgtcctctccgatcccaatgatgaatgggccaacaaactcggccacgccaatttcactatcatgcctgagccttatgaacccgtagtttgtgacctcggccatttccagcagctgcggggagactgggacattgcgcgttgcaactttgccaagcaccttgtccgcactggcgaacactacggtatgacctcgaacatctataagctcaccattgataaatgggattcgatcaaccgcgagtgggcaaagcagcacgaggccatgctcgaccagctcagcgcgatagatggtgttgctctcacgctcacccattccaatatccacccttgccaacagctccgtatcccccgtctgcatgacaacgacaagttccccgagatgggggatgaggatattgtcggcccaatgactgtggcaccggctgcggagcttgcaggtccctgccgttctgagaaaaagagaagtttcttccgctttttccaggacttggtctcccgaccttgagacctgagtcttcgttaggctcttgtcttttgtctttttcatttccacattttcaagcgatccgcaacgataatgacgatagattattccccgcgcgcattctgactcgttcaatctcgcccgcactgttacgattaatgtctctcttttactcttttctttttattttttctgtaatgactctcatgactcacgatccggatcagcgactactgtctcgccccgcatcatgccattcttttgtctatattgcgagtcttgtcttttctgggggctatcttttcttctctttcttggtcctggatgtcttcctgcgtttccaccgaagacatccacttccttcaacagccgacaagaaagagaacgaaaagtgaacccctaactgactgggtgtgccacccttctccttgattttgtctccattacatactataccccccatacaccaagcctaccaaccgttgtaccccatagacttcaaccttactcatatctctgcttcacagcagaacaggacaaaaacgtgaaaagcatctgaaaaagtaccatacaatgtttctatatgtatatatccgtcttgatttctgcacaatacacatatgtttcatatacgaatgtcttattacatctgcatctaattctcaatgaacataatattatgaaaccctcatgtccatatcatttgaagggatgacacggtgcataatagaatcccacgtggaaaagacacttatcggatatgacctccaaggctactgttgcatgtgagtcacatggagaataaacacggtggagagaaagtgacctggtaactagttagagtggatcagccacgttgtgctcttaataataaagagaattcaccccgcgtcataccccgatgcctcgcttctggatgactcttccggtgagactaattttttcacggcgggtaagatattctcgccataaccgcggggttcagccctagtactatccgaagtaacaagttttcagtatcgaacttcgtaagaatttcaacttgatatacaattgaagcaattaatcaaagcgcggttctacaaccccctaaatagtgactctaactacatagcctagaccatgaaagaaaagaaaagcatacttgctactcctagttactccgtactcacgatattagactcgcctagactcggtcatgtcggtctgggctagtgttatcggcgctgcctcgtctccataaatcctttgtgagaatcctttgttgtacgtgagaatccttgcaaaaagttcttcgactcgttctaggaaggatccggttgctacctaagtacggagtacggagtactccggtggatagatgatagatagagactagatactccattgcctcgggtgtacctgcctcgctatctagagtcttattgctaagccatcttgtaatgatccgaataaaaaagtggcctcgggatgaagtaggattggaccggtgaggcaccctaggtacatacagcattgaattgggtcttgttcaattgccataaaaactagttatacaggcggcatagttagttagataatctaccagatcctcgctagttactcagtcaggatgtggtaacaagtgcgctcttaaccctaagtcttacaaaaaaacatcttgtgtccagcgggtagaaaaaaaaacagcaaaaaagtgagcactgagtgtggatcgaacacacgacaacctgatttgcaatcaggcattctaccactaaattaccagtgcgccagaaccctagaccgctaggctattggtcctgttttgtgatttgttttatggtttagggaaatataacatacatttcgtaatgctcaatgtatacaactagcatccggcttgtttttcaatgcgacagacagcttgtgcacaacatataattgtatgcaaatttctataattacatctataaatatctacaattctcatcatgaatataatctatgaaagaccatgtacgtgtcctgtcattagaaaccctggacgacacggtgcataatagaatcccccgcacgtgggagagacagtcggacatgaccactatttaccgaggcatagttcaagcggaaagcgcgctgcatatgagtcacatgtatgtatgtagaataactagttaacggtgcagggaaatggtttggtagagtggatcggccacgttgtgaagctaccgccatttgatcctctcgaacggctggattgggcctctgatactgataacaagtctgcatggtccaatccgtattgagagtgcctcggtttaatctttagttaggtcttgagattgtgagtcagagactctgtctttcagattcagattgcgtctggatccggtaactagagtgtatgtaattgattgtgtactgagtgcgataattggtcgcttactaccatgattacatgacgtatacctatgtatgtgttttatgcgccattctcgggatatatgtaggccatgtctgaggacatgcaagatattccaaatcgcattggatatccctccctcagcctcgggatccaggcagagctgagaatctcggatctaagattatcacagaaccgaaacatgcattgaggcagttgagatcaatattcgcgcatttgaggtccggtgaaactccgccaacagtaataggcctgtacacacgagctatgtttcagcttcggagcatgcagatagagagacaagattgggatgagcacggcgcagacagacgtaagcataaacccgggacttgaatatggcaagcggtaggcgtatataccagtctggtactttcaaacccagtactggccccagatgctctttgcctcttcgttgccatggaactggaactcgacggggatgatgtcgtcaaagccctcgtccagcgttggtgcgcggaagcggcggccgaagtcgccaaaggcgatgccgggaagggatgttcgggattcggggttctggttggaataagaatgggacaaggttagatggatattgccaatacataccagttctttgttggatgctcggacagcgttgttatgccgacataggtctggcgtcgagataaattgtacgcaacggatagggatgttgagctctttcgcgagagatgtccagtgagctcgcgtttctgggtcggcgttggtattatctagggtagtcgggttagatgtgggaaattgggaaactgagataaatgtcactacgtaccgactgccacggacttcttggcttccaaatactcgcgggcgaccttgaggcatttcggacgctgttgatcatcagcattagatttggtttcattttaggattagcttgaaaacgcaccgtcttgagaagatcttggttgactcgttcatagcctagaggctccaaatggttccagtagaaagtggactttccggcacctgggctgccacagaatattacaagctcgagtgggtgcttgcgagtaaagggtttggctgcgatgaagacctgtcaacactctaccagagttgggctggggataccaagttctttggaagaaagactgcacatacccggctcttcgagatctgactttacgaaagagatagggtcgaagcccaccgtcgccggctccgttatctgcccgaggaaaaactcctccggggtcttgaacggcataccgatgttggtagcaagtcccctagagcgagatcagactttgtcacaaaacaacggggtcatggttcttaccgatctacagctgaatgatcacctggtcttccagccgcatcaccgacgaaaaccgacgcgggcaggtcaacaccagcaacgtcgaaatcatagtcgtccaggaactcgcgccacatgccgagacggggtttccggtattcagggtctgtcgtggccgcgtagacgctgacagggaagtccagttcggtcatgacagcggtcattttttctttaaagttcgacagacttttggagtcactccgtccacccttgatatctttttggatactgatcttcttttggttggagaaaatcaccacttggaaactgtcgaagtatgagcaagtggactcataattaccgagtctgaacatacccttcagcgttgagctccttcagtcggcccgggactttggtgttccaccattgccaatcagtggcagatttggggaagacattacccgatttggttttgatcaaggtcgaatcctatatcaacgtcagtgggcctatctctcaacgctacccgttctagcgttcagttcaaccactgaccaagtcaaagccagcgattcggcgctgtttctcagcgggaggcactgtcttgcccgttgtctgctttccgatgataacactcgtgccgatgacgcgccatgtgatcggttcgggcttcttttgcgaggccggggtgaagaagtttgccgccgatttctctgtaggtcattttttagtagtagccagcatgctagtgggtagtaaagactcactggttaccgtcgagtcgaccttgcggcgcagtggtggtggagagatgccttggggggaggcgactcgcttgactgcgccctcggccattctgacagtacgggcgagtgaagacgtcgtgaaggtctatgggtaaatttagatgcgtgttggttgattcgatcagttctcgctgtgagatgcagttgaatccgagatatacgttggacgcgccgagacgcgggagaaatcacgaagtcacatgttctgaacttaaggtgagcatttaagttgtatgccaaatgtacgagatatatataacaaaaataaaaaatacatgaggacggtcatcttaaaagaagtgaacttggaatagctgatgatcccggaaaggaagaaagaatgtcaagcgctagaggaacatattttgacgtcgaatctggcaagatttatttgtaactttttttttggcttttgagataggacttgcacagattttcctgctaagccaagtcctactaggacagcagtacaggcgttgtatttctgtgggattataggattaggtatgcttctatatgcactcccaccgagaggaacgaaaatattcagtcgacttgattgctatgatgggtatatttttttccaataaaaacaagctcgagtctatcaacgccataccgtcgctggagaccgggtattcgtagtctccagcatgctcgcaaccgaaaggtggccatctacttcgcccgcgtatcaagagacaatcgatctgcctgctccaggacaaccgccgacttcaactgttcgcgcaggccaaagagatgctgcgaggcagtcttcatcgtctcctggttgctaccatcttggacaatgatataggcctgcagcacatagcttccgctcttctcgaacaaagtcatatccttcaaaggaggcagctgtcgccggggcaggttcgatccatccccacccggatagtgcagcacgcgatgcaagaagatagcaatgtcattatggatgaacatatcaccctcgaccacatactcagtagtgaaactagaaccagggttagagtccgcgatcatgagatcgattcgatgacgccactcacttataaccccacgcattcatagcctgcacgatatctccccgcggtagcgtggcgctcgacatcagacgcgacgtgaccgccgagcgggtgccagcttccgggatatcacgaaactccaacttccagggctgacgttcatagtcgtaggaagatgaagacacattaggctttgaatcgtccgtgccggccatctgggtgtctccatcgacgggggcagtggatccgaaatccgattcggaaaccggcccaaccacctgggtgtagtacatattcccgttgagcatcttgttcagccgttgcaggtccgcctgttgcaggtcctgactggctccggtgcgccccgccatacccggtttgcggtaggccttgaagatcagccgccgttctaggcaatggcggggttgcatggcagtcagcccggcaagttgctgcaggagctcatgatgttgatggactggaaccgaggcgaaaagcgactgctcgtgcattgtctgatatgtgtgtaatgtagcgggtgaagccgggagatgtccgtcagggtccaagctcctggtggcgcaacctaacgttatcaaagcgatcagactattttttatgtgttgcagctattgctaataatcatagcgtttacggggatgtttgctgtgtttgccgtgtttgccgtgtttgatctgtgatctgtgtgatttgatattccttagcagcacggagtactccgtagttcaatattggattctattgaattttccgatgcgtccatggtatgagggaatccgaattccggtgcgggcagggtccatggatgccccaaggccgccatccagtggcaatccgtgacttccttgtgcccaaggctgaaaggcaacagaaggcaaaagaaggaggagcccatggagagctcaccgagccaccgactgggaaatgaggggaagaggctcggaatctgcccccgaggccaataccgctgggatatggcgtgacctatatagtcttctccaataccccaggcccaggatgtaccgaagtagttcacccggtcccgaatcggctcctagttcttcttatcttctcgtcttttcccctctaaagctattaattctcaatatcaccttctcccatatattcagatctcgttcttaccgtcaaataactagaaactattcccttgttgggtgcctcgttgctctcggtcggattcggataccaccggacccggtcaatttcgcacattcccgcattaaattgatcttaccatcttcccacctcacactctaataactacataactgtcaaaatgcgtgccacttccatcctccgcagtgctgcccgcactcccctcattcactttattggcaagcgctccgtgccaagtacgtcaaatccttgtccgagctccaatcctgagaccaagctaacctcctcccagagtccattgaccactctcctcgtgttcaccccgcctctcccaccggctcgctccctgactctttcgccacctaccgtgctaaggctcagcagcacggtcccctcggtcgctcctccttcaacggcaccattggcggtcactccggtgcttccttgggccccgtcaagccccaggagggcgagttcttcgatcgcgccgagcttcccgcacgcttcggccgtctgccctggaccgaggccgagatcgaggccattgagaccggcggcgcgagcttgtttgcataagcgtcctctcgggcgaaataacaattgtctcaaaatgtatgaatggggcatacttccaatggaagttgcgtgacgggcgagcttgagtcttggatttggatttggggcagttgagcgcggtcacgatctgacttgggccggggcagccaataccttgataccttaccggtcgctaggacacggatctgacgcatgttcactcgttccgaggtttccgagaccagacactctcactttatactctgttccttgggtttgaagcccatctacaaggtcgtctttctctagcggtcattctttgccgctcttttctttcctttcggtgtttttgcactcgtacccggcgctggtggttgctttttctgggtgttctatttccatgcgcacatgcagctgtgtcgtcctgacgtcgaaaagcagagtcgcgttcgtcttatacataggttgtggtcaggacttggtgattcttgttacatacataggctctgtgagcactattcaaaatgtatttctcgactaagcttttcattagatgcataatactagaatatatacagccgaactatagtcttagcgtaagtatcaagggtagcaagtacgtggtctcaagcacgtgcctcccggctctacctcaattcgcccttgtagcccttgactactctcatcccgacgtctaatccaatatgggctctcatgtcagcgagacgaataggctgacattccgggagacagacgaggctggaaatcctactgcaacctatatctactcgggaggtgtcgcttcgatcacttcaacaccgacgggccgagtagatgtaatagtaagttatcatttcttgattcatattggttttctagcactggacgtttgaattgcacgcaaagttccagatatggtcgtcatcttgtggactggcgagcatcccggttgtcctggtatgcctaccaatcgctttataatgaatatgttcctggaacaacacatactctgttttgcatctatagtacatgaaatgtgctcattcaatctcgatttatggcattgattcaaaatatggatgtcactgcatgattcggaacctacaatgctatatcaatacctcaaagtcctcactgttgactaacctagtataacagagtgcctctccatcaacctcatcatggtcagctaagcctctattcagctccctgagtgatgtttttctcccttccggatatcctcaaagtgtcagcgatgactatctcccgtgagtacagcgttgagatatatgaaacatccctgatatataaacattgctaacttcagactagatatcaaatctttgtgagcatcaatccccggctgcaaactggttgtcacagacagaaccctcatggctcgaactactggctctaccatatcaagcaatatcaaagatacacctaggaaagagacctaacaccaatccaccaggactcccttcaagccttctgcagctcaatagcaggcctcctctcctccagagccgtcctccaaggtccatatcccacatccaactagaagacaagcaactaacatccaaccaaaatacaggagtcggcgtcggcaacgccaatgcctctccaacctccgccctactcctacacatcctgcaagatatatcaggccgcatcgcaacgatctgcttcgcccaccgcgtcggcacagccctcgagccggaatgcaaaacctaccgactagcagcagacgtctttaacgatatcgccatgatcctcgactgtctctcgccgggtgttcccgccggaccaccgcgagtgattgttctcagcacagcaggtgtgcttagagctctctgcggtgtagccgggggtagctcgaaggcgagcttgagtgctcattttgctaaatgggggaatctggcggagcttaatgccgtatgtgccatttcagatttctgtgcactgtcttgttaggaaattgacagacagggctaacctatattttgtcgtgtagaaagactcgtctcaggagactgtcatttctcttttcggcatgctggtaagcatccatccctaacccaaagaatctgccctaacaaacccaggtcggatccgtagtaatctcccacataaccagcttcaccacaacctggctcctcctcctcatcctgctagcccttcatctaagcatgaactacgccgccgtgcgcgccgtgcaaatgacaagtctaaaccgccagcgcgcgaacatcgtcttctccgccctcctcgactcagacagcagtctagccctagccctagatcccaatcacaatgtcgaccctacggccacaactacaccagagaagaaaaacaccctcctcacactcacaccagcacaggtcgcccagcacgagcgcatcttccaccgagacggcgcattgcagtggacgcagcatacaacaacccagcacctagggtccgcgcagataggcgtgtctatgtctacattcctgggtaattccgggtcaggtaggacattcccacgcacgctcccgctgccgcaacttgtgactgttttcgcggatgagtattatatgctgtttctcgcaccgggagggaacccgaattcgaatacgaatgtaaccaaatggcatgcttcgattctcttgaagcggggctgtgcagtcgagcaccagttgaaggcgtgggcacatgcgttactggctgcaagggttctagctcaggtcgggatttcaacggagtcttcttctgttgatgcggttcttgctgttgtggagaagacgcttggcttgttgaatgtcgatgcacgattccagggatatatgatggcgttgaggggtgtggggtgggatattggtattgcggctttggagacgagggggggacggaggattgatatttgattatttacacttacttacatcttctatttcttctatccatacccggaactttggctttcattcagccttcaacctttatcccattctacactcgatcctatcctataactacatatggtaaatgcaatgaaagccaccctccgcagtgccgaacagacatcccattaacttcgaaaggcagcggagggttacgtgtgcatctgtgctacaacactagaagccgatctgtacgtctccccgggctctcgctttcggccgacatgtctgggtgtaggtgtctgacgtgtgtgacgagaatgatcgagagaggtctagacaagacggttggtttcggagttgaggggggatactcggatgcctgctgggaggacgggtggtgtgatttgattccaaggtgtttagttaaattgaaacatgtgttcagaatggaagagtcgaagtcttggttaattgctgggtttggaattgccctgacggttggatgcatggcctatatatgtatgtgtatgtgcatatctgcatgcgaattcaacgctacggaggacagacactggagtacatgatatacttttgtatggtttcactgtttgaaaagtaatgcgaggaggggtatcaagtctattgattccgaatagaataaaatcccaattttgggagatgagagaccaagacatgtctcgaccaaaacgccgtgtgtccagaggacctgaaaagccaccaggtcctctatccaatctatagatgagagtatgatatgatatatatgggtttcttttcccgatgccaaccgccaaaaaaccatgaaaaaaagtgacaagtgaaaatgaaaatggaaagaggatgctcagccggagacatcccaaaagaaaagaaaaaaaataaagaaaacgccggtttcatatgctttcaatgcgtcatgctctcatacaccgccaatataaacgctcgacaaaggctagaatgaagtcgtgggatgatgcatttcatgcaagtgtgtaatgatgagaagagtcgttgcgaggttcgtagttgtcgtaagtccggagacaaaagggtgtgttttgggatctcgacaagagtcgggatcaaagggagaaaagagaagacaattaatcgtcaagaccaagaatcttaggatcgcgattgctaccgttgctgcctgtagtggagcgcttcttgaagccaagcttcatacccatcttcttccaagggttctcggtgcgaagcttaggactgtgcatgggaagatgcggctcgctggcaggcggtgtggtgggcggcgtcattggctcctcagcggtggggctagagctggagtcatcggtcagcgacaggtaagctgactccccgctggtgcttccaagggcgccggaggtgcgttttccgagggcatgcatggcgccgagggacatggtcgagcggttgtgacccgttgcaggaagatccttggtagacgactgcggggaggtgcgcttcgacacgcgcgaccggactgttttgatcgggtgctcgtctaggctcgtcgatgatagactcatgaagtcatcgggccccacaaagggatcggaaggacccatggagggggaagtggtgtggctgttgacgaaggggaggaagatggactcctccatcaggtcgtggatgcgcttcacggcggaatctaacgtctcgggcacgggcggcgcggtcacattcttgtactgtaggagcgcatcgcggacttcgctcgacaggttgatctcgcgcggcgacccggggaagatgtatgcagacaataggcgtttccagagcattcgcaggtgctgattctcggggcagtccgattccaaggcggcagggcccagtcgtccggccagagcgtagtaggaatcccggtagcggttggcctccatggtgaattccaatgtttcgagacagtgattctgggagaggtaggccatgaaggcgctcaaggtgtatggaggaggagcaacgttggccagcacctcgttgagcgtcgggcgcatggagaaggcccccgacgagatggctaggctgaccggccgggagccagaagattccatatcctcttcggagtcgctgtctgaggaggtgggggacaattcgggggttgcggtaggagtatggttccgaaagaagagagacggagccagcgtcttctttttaagcatagcgtagagtgtgcgtcggggacctttgatcggcttttttctcaccggtcgtcccctgcgtgtgggacgaggctccagcttgagatgaaagagggttatcgggatacaggcatataggatgcgcaacacgggatgacaggaatgtagggaacgtagggaatgaggtagagtgagtcgggtgcgtatagtttggagaggcaatataaaaggtaaataatagaaagtggaaaaagagaagcggaaatcacagcactaaagaagaagaataaaaaggtgcaaagggcggattctcgaatcattattcatgacgataccttgggtaatggtaacggggccaccctcagtagacttaagtggggcctatgggggacgctaaactagtttctgcgcccaagtgggggccggtggagtcgtctttcgataagatgtcattattatttttcttttttcttttctttttccgtttttttcctgtctatttcttcattcggtttatttcggtcttttcgcgtcgtggaatttcctgattggctctggctctgtcttattgtggcaacacactgaactctcacgtttgaacaagcgcctaagatctgcaagggagacctctgaaatgtacggaggagacaatcttctgtcgcgattgaaatcgaagcacacgatccaccgatgtattatgtaactccatgtcggtccatcactccacattccttccagaagtcatacgtgtaagcttccacgggttctggaaagcgaacgcgcccaacgtggcgactttgaattttcgttcccctgaactccaccaacacgagctctttgaagatacactccatccgacggagtaccccgtacaatgcatgtccatcttctatgccggatgaggatataactcctacatctactgcctaattgacgatagcctcttatctcccggacgctagcacgccatccgagaccggaatgtcaatcctgacccacggttctgtggtaaagaatgaccgtaccatgacgggtaaaatacacgataaggccgtgtgtcacggcattccctccttgcatcgaaggtcctcaactcttccaaggttggcgttcccgggctggcgtaaggttcccaggtctggcacgtcatctaaaccgtaattaaccgaatgtattgtatcaaatcatgtacatttaagttaacatggccctgccgatcattccaaacccggttctgagggagatcatctgtaactcacactggaatgtcacacaagctctgaactttgtctctcgatcattactagatgcatgctcggggctcgtggacgcgtatgtggaattcacagggatccggcaaggtacagatgaaagaaatagattggcttatttggtggaggcaaaagagcgacccgagcgaccgtggaataaggaataacgaataaatagcgaattcaatgccatgctcctctgctatatcgtacaatatcaaattcaactgcttaactatatccttaaccgaaataacctgactgcagccgaacctgcccagaccttctagaattctagaaaccccgtcgaagcactctagttccttcaatccactcgatcgccacatccgatattaattcattctctcagcccctgaacggactcaagttccacacccagtcacccgtagcatcagagttttctttgtagatccgggtatcgccactatcatgttctgtttgtccgagtctgcccacatagcaatatcgaatacaacatacgcattttatgcatgccaagccaggtgtaagtcaccgttgacatggagatcgttgcgacccacatcctattccttttttcccgacaatgttcggccgaaattatgggcgcataccgtgatactacggagtacggagtatggcacatcgtggtactgccgattcaaaccgagcgccaagactgggagagatctgtctatagatccactttttgtctttcactgagaacatggaggaatgtagtataaattatagcaagtacgcgagttgacatcaattgtgtcagatcagtctgcacgctctggataaggttgccgttgaatagctcaatgaagcttggttctacattaggatttgacaggtcgaaacatccatgtgtgcgtctgcatgcaggatatagaagtgttgagtttcatggattaaaccaattgggtaaagacgggtattacttgctattacttgccattgagttcatctcaggtccacactaatagggtatcattgagcttatggtcggatagcatactagtcaatattttgctttatgcaagggcacagaccgtttgaaaaaccgtcaaatggcatagaacatacaatagaacacctacagcgtgcagatatagtagtactcggtcctacattgtaatgcaatgcgaaaatcaaaaagcaaaaagcaaaagcgctggaccaacagcacgtcaaccccagtactaagtagcaccagcgacataacccagcacgccattattaccgcagccactcttcaaaaccaaccaaatcccaaacctaagcgcctagcaaagacagaccaagttagacccgactcggagcgggcctcctacgcctatatcgcagcgaaaccgcaagcccgtattgtattaagcagggactagcatacaagcgatgcacgcgagatccactcacaagaggagctcaaagccccaataatcgatcttttcttggccaagtacggaggacctaaacaggaaggaagcggatatccaccattcttccttcccccaatgttctgagagattaaggacaatacccccccacatcggtgcccacgtgattccgttacgcccttaccgtggccgcgctggccatgttcttaccttttggtttcccaaatgcgtctagaacaatggtcttgcgttagcgaggtggatcttggatttattttcttctcattgctatgtttatgttatgttatacgtatggggtgcatttccattctaatattagggcactactgtaggtgctgatggggaattattttgcagggagtgagacttttcctctttctgttctttcgtattcttcccttttttctcgtttgtgtatatatgaggtatttactccgattccttagggtaatagaggacagattgtggcatatatattccaatggcatatatctgcatatcttcaaggattatcaccggatattgtttgtatggggtaatgcctagacatggccgtttttcgtcactaaccagaaggcaggggtgttgtcgctattgactcgtgcataagctacattagtacctgcatgatccttgacgataatatctattgatcatccttggtgtcttgcctagtttgctatacccaaggatctgactattagtcgatagtaaccagttatttactcaccaagttacctttatatatttgcaattgtgtgatgcgattgtgtaacaattgatgcaatatccacggtgtacaaaatagtaaaagcgttgataagccaagctcgaactaaacacgggtcaagcaaggagagacataatcaagcaacacgccccggatctacccctgaaaccttcgacgctagcctgtaatatctctgtatggtgtgatgatgtgatgatgacaaaaaagtaccacggaccgttgagccagtcgcaaggaagaatgtcgcaaccaagaagattgccgatccgcacgggatgatctctccagaagagaagaaacacgcaaccctgttcagcagtggaccctttagctaactaaaatacaagggaaattgacccggccacccacagcagtcgatcagacggcagatgccgccgtgacctcatgtttccccactgtttcactgtaatcttgattttagccaaacaacataagttgtatgataatatagcactagattagcagaacgatcgagactctaggctcgtttcaggcccttggctagaaggtactcgcccccggcgctacgtgaaacctatgagacactctgatattgttagtgtcagggtaatttatcgttacgagggctcagactgtggggaatgcatgcgactaactcgttctagactggccttatcaccgtcggcgctaaatattggttttgctttttgggatggcttaagggttagttacgttgcttgtatgcactccggtctccggagtttacaaagtgcgtttcatactacgcgcctggtttggccaagacaccatgtgttagcccatttaagggtctatagttagattttgtggctatcgtcaaactccgtatagaatatcaggatggtgttatgggcaaggcgatcccgtacaaacattttcaatatcacacgcagggaccaatagccccaatacccatgtatattatagcataatgataacataattgaaaccctgataccataccacacacatatgtactccggatacgagagtacagagcccaaaagataaccccctgtcgataaaagcccaagcccaagctcaaactcaagctcagctccaaaccaataacagcaaacctcaccagcccagcacccaatccgcagcagaaccagcccatccccgcagaacccccctccgcctatccacgcacacccatggaccgcaaaaagcaaaaccgcaaaaaagaaaagaagacagactcctctagtttcggccacgccaagaccaaatcgccaagcggggaaggagataaatgcgggggaatacgccattagcacacaccctaagaataatgctaactaacgtcaactagttagttagttagttgactaaaaaaccccattacgcatcctgaggtaacatggcacaatatcgagtatacccactgctccgctctgactggctaccttgtccggggggattctgagctgctctgcacggcggaccgaaaacagtccagttcccgcctgagcggggttggtgtttgatctcattgctaggcgcgattgggtatggattgggatcggatcctgttggaccctgtcgatgcttctagatcttggctgggttgcgtggctggtgcatgtccgtattgcgggttgtcattggtgggctgggactgcgcctttaataacgacttctgggtttgctgtgtggtgatctttggtctgattggttctggctcatgtgtgtgagggagacgtgtgtgtccatggactggtgtgtgggcaaaggcttgcttattggatggtgcggcgtgccatgggtatactttaggttgggttgagggatgcgtacgagtttctgtttctgtgatactttccacatgatactttaaagttatgtctctgcagagtctggggatgatgatcaatgatcgacggttgttgacaacctgcaacgtacgttgtagtcgtacttcgtggtttggttggaatcatatgattatttgacacattcttgctaggctcaagatggagatgccggggattggggttgcttgcttgtcatttcccatgcacatgttctgcacggctgaatggggtaaacggctgtcgttgagacatactactttgagcatatggggagatgtcatatccccgctgtactccaccccggcgaagaaggttaccctgttgggtgatctacgtcatgccatgacatgccacggactggtgatccttgcattagcgtgtcaggtaaagctgcagaatggctacaacatacggggtagtgtggctgcacgcaatattcacatgttgtcagttggtatcagtcggaagcttgtgattgtcgatcgagtagagaagtggcgaaacgaagatgtgaacagaggaccaatagcattgaaaaggctgaatgtaaccgttggatgtacatagctactagaaggtacatacttccaatcagtcttaggctgtacctgattcgggtacagtgatatgttttctaaaactagcaagcaattgacaaggccttctaccttcactcccggctgttctggatgaatatatttatctaacccgcggtgtcaacatggtatgaccaagagggtagttagttgatttaacacacaaggctatctagtgtatgtccgtagaataatgataaactgatttcatttctataggcagtcctccaccaaaccaacaaatacaaagcaactattgagaccagaccaaagagataagaatgcaagctcctattacaagaattgtttatatacgtcgtacgaataaatggaaaagacttgtaagaacaaccaaatgaaaaaaaaagaagaatgctatcttaatgcctaccagtaacaaaaactcgcttctgaaacagagcaagaaaagagaaaaacaacaaaagacaattatagacatggacaatagatctttggaacaatcaaaagggcagagcagacggttgacaggaagagaaaaaggaaaaggggaaggggatatatgcaacatgctcttccagcttctgcacgcaataatgaagaccacgcagtggaaaggattttttccccccggatgcacaggatgagaggagataacaagaatgacaagaccatggtagacgggccggagaaaaagcacacagagagaaacgagagttgcctggtgtgcttgtccagtcgatgaacaggaatgagaccgagagataccagagacacgcccaagatcaatcgattcggattgttatctctcggaactcggttcatcctcagggcggattgtgtcattgagccatgccaattcttgtgcgggggttgaaaccattgatccaagttgtttgtctcccgagccagcgcaagaaacaaggtccgagggcggcacgccgcgagtcaatggcatcggaggatcaaccgatgagtacctgcccatttgaaagaccaatggttgatattaaacggtgcacgccggatatagtgacgagacaaggaagcgaaatcgaaaacaaaagacaaaactctcacaagttcgccgttccgagtcgtagcaccatgaaagagtgatgagacgtaacatcaatgagagaaaggttgttcctacccacagtcaaatgtataggctgaaggatcgaatgggacaaaaagagtatggccggaaggtgatttaggccgagaagcacatttcttgctcggcgaagcggcgctaaccacttgaacacaagacaagaaagagcgagaggtgaagtaaacaagaaaagaaaagaaaaaaaaagaaatcccatgcagaccttcttaggccattttctgacatgaagggcaggaagcaggtgaaagcgtggcgcggtacgtctaaatgcgccatcacttcatttggaattcaacctggatcctaagatgagctgggcgctcaagtgatgcagtacagctgaatcacctaccgcagcacagagccttcatcaacttctgcgagaaagtgggtgtcgattcaggggtacctggggcaccaaggggctgttggttactcagccccgggttccctggactcccgttgcgaccggagaggtgggcattggaattttgaaactgagcctgggttgacgcagctggagtcgatgattccacccccgcgctctggcgtttgggaggaatggcgccgccggcgcttggtcgctcgcgcgtctttccagctccaactttggctggagaaggaggcgggggctgcgcggcgtttaaacggtcggctgtcactcctggacgttggctgctgcggagctctctggcatgcgggtcgcgagcagtcgagctctggtgctggttatggagatgtgactggtttgggtaggacttatagtcccagccccgtccgttgttgagcttcatccagtcgtactcgccatcctccacctcgccggcgttcttgagagcttgtgtcaagatatcacgcagataatcgtagtcaggggtgtcctcgaaaccaaggttacggacgtagctgaggtacttgttgaattcttctgacagagtggttagtagatggttacgggtaatagtgataataacatacctggataaccatcgcagaggtccttgattgccgtcgtttgcttcttctcgccaatcttctcgtacttctgcttgttggtagcagccttcaggccctgccagggaaggccacccctcaagaaatacatgaagacatggccaagagcttccaagtcatcacgccgagattgctcacgccccagatgcgtgttgatactcatgtaacgagcagtgccagacaaggatttacgctcgcggtaaggaatgtgttgcttggtcttgggatcacggtattgcttagccataccgaaatcaaccacgtggataacattggcagccttcgttgatggccggccaataaggaagttgtctggtttgatgtctcggtagatgaggttcttctcgtgaattgtttgaacgcgcgaaagctagtgaaagttagtcacggttcatgtagttttgatcagggaaaacgcaccatctgcttggctaccatcacaacagtctttgtggtgaagcggcggttgcaatgatcgaagagatcctccagagaaggaccgagaagatcgataacgaggatgttgtgcagaccctcttgtccgaaatagtagacattgggaatgccagctgacatgaagttagaagaccgtacaccatcttattccttaggaatacttacggcatccaaccagaatcttatatgtccggtactcatcgcggagctggggagcatcgcttttccggggttcctaattgggtcagccaggaggctcgccggccaaggggaaagggtgcgatacgaatttgatggcgacctgctggttgttcaggaggttggtgccctcgaaaatgacaccaaaggagccttcaccgatcttcttgcccacacggtagtggacacccactacgtttgacgatgaggatgccatggtttcgggagtaagaattgtcacccgcgggaataaaactttggatcacggggaatggcttcagggacgtagacacgtgattgatactatgactgggcgcagttagcacaggaagtcgggtgatgaaagcaatatcaaggtttccagtcacatacatcagtaacctctattttttttttccgaccgaagcagctctaacaggctcaatggagtctattcgtcaaatagccgatgtaccggggacggcgatgaaaggagacagggcggcagacggaatgcacgatcgggacgagaccaaagggacggagggacgtctaaagccgaaatagcccaatacaagcggaattggcagtgctgagcagtaaatgaggcgttcgtgggtccttttttgacggtcggaagtgacgagctggggttgaagccgggagaggtggtagacaagccaaagaaaaggggaaaaaaggggaaaacaaaacacagagggcacttcgacctactgcgagtacggaccgcactgagcagtggtttcaaagatataccagaggacctgagaagggagaagatggagaagaagagaaagagaaggtgcaacactctaggagagagacagggagcggagggtattgggttcgtattggtaaaagacgccctggaggggaaggggggttagtcgcaggaaccgctggtcacgagaatacagtgactgtatggtaactttggggatgggaaaccttctctgagacctatcagaggtcgtcgtcttcattgttctctataactaactagcagttacatatagactcttattaaggcttacgcttgttcgaagaaagccaccaaattgcctaactcttgaatattcccatctcgtacctaccctctcccgagtctcggcgcttccgaagcggctcaatctccagggctgcattaaccaggcaccggaaataacagggaaattatatacatagtatcggctacgacatgcattttgtctcaagaaagaagttataaccggggcagcatagacaggccgattcaagttttctcatttcaggggagagctcccgtctggaggttaatcaggcggtaatattaccgtcttggcaggaacccggcctcccagttcgtcgatcactatgatctgtgtccacgtctctagccctagatatgacatgtccactagatagcccgataaaatcacaagttcatgcaatctaatgctagtatcgttacattatagcagataccgcgataaacggctccatattgattggactagtggtcttcgggaatgtcctcggcttcgctcccaagttcattctcaaccatgtcctcatcactgtcctggccggcatcttcatcgtcctcatcgtcctcatcatcttcactgctggacccgctgccttcactatcgtcactttcggggttgtagtcttcctcctcttcctcctcttggtcttcaagctcccgctgagctttctggagctcactttcatcttcaccggctgcctccgcggcgggggcgnnnnnnnnnnnnnnnnnnnnnnnnnnnnnnnnnnnnnnnnnnnnnnnnnnnnnnnnnnnnnnnnnnnnnnnnnnnnnnnnnnnnnnnnnnnnnnnnnnnnnnnnnnnnnnnnnnnnnnnnnnnnnnnnnnnnnnnnnnnnnnnnnncccggggggggccccgccgcatcctctccgccggctttattcacattgtagaccttggcgcgccgtgcctctgcgagactagcatcttggagaccatgtcgtttgatgtaagtatcgattccggagaaattatcctggtcaatcatcgagaactcgaattcctggacgtcttcctcggagccattctccgggcgagccatgacattgagattgaatgtccgctggaggacggatgtatacgaaacagagtcaacagttgcaaatgagaagaacaggagcggtttcttgaatgcaaataagataccggtagaaagaaggaagagatagcctggcgcaagccaaagtatgttagaattatcgagataaaactagaagcacaatggcttccagtcagatggaaatatgaatgcaacataccttctttactaccgcggaatgctttgacatggtatgctttctcgcccttccggtgcgcctcaggcatggcactgacaaactgtttatcatcagggcgcacaacacgggtgtgagccatgttctcatccaaaattttgcgaataaatgcctcggccgattcaccgggaccttggccaagctgcttcccatctcctgagaatgctgccttggctggtccatcggctatcgtaaacaccatagcttcggaggtcgctgttccctcgggcgggggtgtgattccatcggcgtactcggggatgatacaaaaattgaactgtttttgtgtcttctcgggcacaggaagacagagggcatgtcctaattcgtaacagatcatgttagcaactcaaaagttttcttgaccaagtaaactcaaactcacgaattttatccatagaaacaccgaattcaatctccttcgtagcttggttccttgcccgaagatactgatgtccagcagtgacctcgagcgtaagcttcttcctctgcggcgtagagaacgaaacatcttgaacataaaaaagaagtggcgcattgccatctttcaggttgactgacgcctgcgcagtctcccccgagtctccattttgaagctttcgctttttagcggcaggccccccccccgcccggnnnnnnnnnnnnnnnnnnnnnnnnnnnnnnnnnnnnnnnnnnnnnnnnnnnnnnnnnnnnnnnnnnnnnnnnnnnnnnnnnnnnnnnnnnnnnnnnnnnnnnnnnnnnnnnnnnnnnnnnnnnnnnnnnnnnnnnnnnnnnnnnnnnnnnnnnnnnnnnnnnnnnnnnnnnnnnnnnnnnnnnnnnnnnnnnnnnnnnnnnnnnnnnnnnnnnnnnnnnnnnnnnnnnnnnnnnnnnnnnnnnnnnnnnnnnnnnnnnnnnnnnnnnnnnnnnnnnnnnnnnnnnnnnnnnnnnnnnnnnnnnnnnnnnnnnnnnnnnnnnnnnnnnnnnnnnnnnnnnnnnnnnnnnnnnnnnnnnnnnnnnnnnnnnnnnnnnnnnnnnnnnnnnnnnnnnnnnnnnnnnnnnnnnnnnnnnnnnnnnnnnnnnnnnnnnnnnnnnnnnnnnnnnnnnnnnnnnnnnnnnnnnnnnnnnnnnnnnnnnnnnnnnnnnnnnnnnnnnnnnnnnnnnnnnnnngggcgggtgggggccgcgaagggagggtggtgttggtcctggccagcaggctggaagtatatttcgcaagatcttcgaacagaggtttatgctgcggtgttgtgcctaaacgagaaaacccattggcgacggtcagcaggaggtcgacgaggttatcgaagggggacgtgggtgcgttgttggctacgcaccgatcgcatcgtagactcgctttttcagcaagggttccgtcgcaaatgcctcctcgatggcggcgatgggcgcgcccgaagaattaatggaggcgaatgccatgtctctttgcgactgctttggttcaacagaacagcagtgcagggagatgcaggttagtcggagatttgggggatgaaagcaagggtggacccgaagtatccgcattgattggaaccctaacttggggatcatgtacggagtatggatatctccatactgtatgaattcaagacacaaatccgaattaacttcatcaagaaatagatatatgagtgaatgcaaagcttcatactagaatacagtggtgtgtgtacacaatgctacaggaaaaaaactccctccgccgacttccatctccttcgcccaatcaagcagcctgcttgggctttgacttctttgtctttgttggcttctggagacgtgcgttttggagatgcttgttaatgaagtcaatagcagccggtgtcaacgccccattcccgttggcatccaacttcgccttcctcgcttccgcaatttgagcaatcttcatgttcttgacatctgtctgcggtgtcatcatagagacggtttttctgtattccttgcgatagtcctccttcatcttctctctcaggtattccggatcgtgtcgagtgcggaatctggagtatttgttgcgcagctcatcaatgacggttgtaggcatgggcgggtgctccagtgtcggtatgaatgtgctggcttcaaccgccattcgcgttgtatccatgtcgccgtcggtgatgacaggctcttcctccaacggccaagggatttcgacgtccaagccggagatatagcgagtgaatcttgggagcttgctgtgttcgggtcgctcggtgtacggcccagcagcataagcgtgctgaacaatgacgttctgcatctttccagtctgtgtgtcttccagcggaatgacatgtcgaatgtcgtccatagacacgggaaaggactgtggttgggtatcacctgcttgtcccattctgtctttggcccattcgggaatgatcacgtcggcctgattgaaaaaacatcagtgagcatttgtttaatcaagaggtcattgacttgtatggctggtccgccggagacataacataccacgttgatacccttgatgaggacagtctcactctcccggttgacctgctgaatgacattgatctttccctgatcccgtcctcggataacgcagacccggtcaccttcggcgaagaggacatgtctccgttgttcgtgcttagggagacgcggtgggtgcaaaacggaggcatcctgaccaccatatgtggtacgttgtagaccagagtctcgcatgggggcaagaggccccttttcccaatcttcccagcggttctttcgtgcttcttggaattggccagacagcgcgccgccgaagtccttccgcgcccgccgaatcccaacacggtctaacaattcctgtcgttcatgagctttgtgagtttttttgagagcctgcttccgggccgtagctgtccgctggataactctctgcatattgggtgttgtggtccagcaatggccgaacgttgtctctgcctcaagaatccccaattcgcggatcgaaaattgagggtgtccgatgagccacgtgatcttgcagttaagggtaatgtgtattatgtcagcaaccggttggcagcctgaaacattcaagtagttataccgagaccagctgtcattgattctcacaatactttattattcttattgtattgctctatatttgagaaggaaaataccccatggaaagtgacaatgaaggctgcgaacgattgacaggcctcaacaacgccaacaaatacacgaaaaagccaatgtattcctacaagcagctttccgtaacagctgactaaattcgagggccacaacccacatggaaaccacaccgaggtggatggtatctaaagatattcgggcaatctcatgattgaaggtttatatccgaggattcggggattactgatggccattagacacatagagtcatccgtgctttggaccttctaattctccgtacacgtcctttcccagcatttagtttccgaatgccgtcagaggaacgcacttgtcttcttcggacaatcaagaagcaccggcataggttatgagatacgtatcgacgccgattcaatgtggttgagactattcttggacgtcgcttcattatgaagctctaagagaccctagaagagaaataccggcgcgacatcgtagccttaggtgtgatatcacgcaaaacttaagaagccaatgagatgccgaaggcgagcccgaagataaaaacaatgcctttccgattcttgttgggcgcaagacaagtcgggtcaaaaagtacataagcaccggccacggccccggggtatcaagatgttgtgatcaacgaagtggattgaaaggtccctttcatgagcagcatttgctcatgcataaggtctgggtgtgctcaactttgcctttagtccagatttgggttgggacgaggaaggaaggaaatctgtcacaacgtcggattgtatctgagatcgatcgtgaagtcccatacaacgcccattgaaattggcacacggatccatttttggcggcaaatgaaccaacactgataaatattctaaatatgtagcttctgtcggcacgctaaagcattctcatttacctcggaagaattatgctctcctatttttgggttcccgaaaaacaacttaacggcttgtggcttgtgggcgcaagctccaggatttggcccctgtctactatttttagcctgcgcaacacgatcattggagctggcaatatatcaactccactttcaaaacagcgtcaagaatgttgtaagccatgtaaactcagaagcaagcgaaggggcagaggtttgatggtgtggtggaatatcggaaattccatggtacaattaccccaatggtttgacgacacattcaattttgggacccccctggatgcagtagcaaatgaaacaaggtttgccagcagatagcataagatcgttggaaacctccacctacaacgtagtcagtacatgccgagagctcccggggagcagatcagcaccagaagcaactgagatgcagggaactatcggagcgatcttcactggccgagtcaagcatttggtactcctgtaggcctggaggcagccgtgtaggagcactgcccgtggaagtaaatcccggtagggtgatacattatatgtgagatccgaggacgtggagctaagaaattgccgtagtagcccttcatttttttatgcggtgtatgctgctgcatatctccataaatgtaggtttttaggagatgattgaacgaatggacaaagttgggttgcttctcaagctccgaggagaagacatgagccactgaagcagtacgagtgaaatttatacgccgtagtcaatacaccataagaggactgatatcacattttgctcatatcagataccataacagccacgggtggctgtgctgcctgtggttgtaagcaacaaagcgcgaccaagtgggccgcgtgatgtggacggttggacctcagccacacatatttatggctgtgtacctattaagttcgcttttctcttttctcaacctcggaaaaggggagagcccataagccacagcatataaaaaaaggcagcctgaaactcagggggtacacttgggtgtgtgttcatagagtgttggcatgatacatagtactatgtatgtgtatgtacatgtacgagtacgccgtaaaggcaacgtactcatgtaccaatgcagaccgatattaaaagccgtacaacgtatgaagtcccgaagcagtaccattaagatagtcatcggcgcaagttgatacctcatctagaccttgacacgaagcatctccagggggaaagccacaataccgatacaccaactggcaacaacaaataccgtatactgccaccgccccccgttgtctagcctggtcttctatctttctctcctccacctccaaatcatcattccatcgtcttttttccatcgcttcccatcggaaatacctcgtccatctttctaatttccctagagctattgctgctggcactagctgatttactgcattaaatctactactccgttgcgcctttgaacactgtatgggatcacccttttccttttcccccctcctcgggagcctggcttcgccctttcttctggatcgtctgttccctgtgacgccctcgtgcctgtagaaactcttgaatcttgaaaatctaggacttgcggggctccctactccctcctgcttatttgcccctatactgacttgttccttatcaagatggccgagatccgtcgcaagctcgtcatcgtcggcgatggtgcctgcggtaagacctgtctgctcatgtgagtactgaaagtggctctctcatcgaggtcgcttccctaaccctccgcgtttactctttcgttcggccgcctgactgaagttcgcagtgttttctccaagggcactttccccgaggtaagttccccccgattcccgaaagcatgttcctttctcctaggaatatactccggagaagcataattcatgaaggatcatctgactttgtttccgtcaggtgtacgtccccacagtcttcgagaactatgtcgccgatgtcgaggttgataacaagcacgtcgagctcgctctttgggatactgctggtcaggaagattatgatcgtctccgtcctctctcatatcccgattcacatgtcatcctgatctgtttcgctgtggactcgcccgattcgctcgacaacgtgcaggagaaggtgagtgtctcatctctgatcgatcgtatatcctggagcaaatttctgggtgcgaactggaccgaatatgctgacgcactacaatagtggatctctgaggttctgcacttctgccagggtctccctattatcctcgtcggctgtaagaaggatcttcgcgaggaccgcaagactattgacgagcttgccaagacctcccagcgccccgtttcgcaagagcaggtacgttttttcaacaccaccatgaatctattataaactaatataaaactacagggtgaggaagtccgcaagaagattggcgcctacaagtaccttgagtgctcggcccgcaccaatgagggtgtccgtgaagtcttcgaggctgccactcgtgctgctctcctgaaggccgtcaagggcaagggagggcgcaagcctggcaagggctgcctgattctctaaacgaactaattgttggtatgagagcctccacgaaaaacaattggtgacgttgttctcggaaaggaggagggcttcatggcctgcatgcgaaattgtggataatatcgaatccgggcacccgagtcgtggaggtttccccccacaattcagctggtcgaccttgtgtttttcttttgcctttatttgcagaatttgtctagggaggcgttgtcttcatcataaccctgtgggcttttctttttcttttcctctcgttccgacgccgtgaattttcaaatgccaaaccgccgcgttgaggtggcaactataaacctaccgaaaagcaccgaaaaaaagatcccagaattggaacaaccgggagatgaagaggggaagccattcagtgtagcaccggttgtgcaatttggtcaacgccgtgactcgccttccctggtcgagttcccctgtgtcatagattcttgtccctgcggttatctccccatacgcgaagagcttgattcggcttttactgttttctctccctcctttactacatttgtttttatgttacagcttatgcatggtactgtctatttccatctgatatgtgtaccttgtcatgcgtactgcgtactctgcgtagcgaagtgctccgtaaagctgtaaatctttcagtgcttccgaccactagagtattgcaacaatttcgagctatgttcgaatattgttgtttcgtttattttataagggcatattgatatacctaattctgcagacgcgtaaagaaaatccatctcgactaccgattcaaactaaggagaccctcaatataacgtctagcatccataccaagcccctcaaccagcttcgacggcgccatatccgcagcacgggaagaccctgtcaagccagcggaagaagatgcaccgcctagatcacggaagaagcgagcgccactgctgacacggccatgatttgccggggagatgtagtcgctcgctttgcggacgaggaaggcttcctgaggcggaggagcaatttccgcttgggactgacttgccgagaaggagtcatccttgttggctatgaatgagagggcggtggatgaagaattggtggataacgcggttggagtttggtttgtgctgtgtgggatgcggacccagacgacccaccatccgcggtgggttttgcttgtgcgttcaagctcttgcgggcgggaccgtgtgtctgtgtatgttgataggaggcagtgatggattgctaggctttcaatgcgggaccaaggtggcagggttgatgatggggaaggggatggagaacgggctggtgagttgggtggttgggtggaggaagaggtggagtctacgctggggatgttgggaatggaggagcggatggttaggttagatgggtcatagactaggtcgtagactggctgggtttgagtggagaaccgtttattggggtccggagagctctcggacatggcaattcgagaggctgccattgttggggatgttgatgataggagcggtttccgaagaggaccgagttggtgatgcatgcttgagtatagcgatggtgacgataatgctggtgtttcaggatcaaaaaggaatgtaaacataaatggttgatgctggagtggttatattagcaagctgatttgcatggaataaggagaaaataacataccacatatatcacgacctggagctttatcggagtagtatccgatccatctgccaggtggacatggagagtcctctgtactatcagagtcttcggcttgccgttctccgagtcgggctctgggcttccctcttctaactcatccaatttttctagatcatcacggggcccaagaacgaaatatcccgaaggaccgttcctcttgctgttccgatgttttacaccggcctggggtgattgtgtagcactaacgggctgacttttcgggtttgagatgtgtgaattggattcatcttgtactggagtaggactttcaggcggcgtagatgtcgaccttggagagaaactccaagaggagccatatccaagagtgaggtatttcatgaccgtctctgttggaaaccctatatattcgccgttttgctcggtgcgaagtggtgatgcctcgtttcttgttcctgcttgattctcctcaagtggttctgggagtggctgtggtgttgctattatgagcggacgaggtatacctggcttaaaattgtgatccggcgtggacggaggggcatcttccgaaatttgccttccacgttgctttcgtggtttacggcgacgcagcgaggttgggtcccgcccaactccatacgcagaatccccaaaccgataaatgcattccatccaatgtgatatttgcgccaatgagtgccgagaaagagcaccgacaccagtaaataccacaccgtcggatggtcgagggtcattatctgccccaagccatcgagtttggtcatttgaccccgcaggcccctcgaactgtggggatggatcaccaaacctggagacaaccaagtccaccaacccgtcgatccttgtgacgaagtcttcaagtacttctctttccccgctgccccactcttcctccccgacgccgatccccaactctcctcccgcagagagtttgatgccattatagatatcgacaattgggtttccggtcaacagaagttcccaattccacgcaaacttctcccagaaacgctcaagaaacagacagaatgtggaccttccgacttgatggaggatgtcgtccaatttgaagtcatggtgcaggaggaatgccgaatgggcgcgacgtaattgctggatcagtagatgtggcggccccatctctcgcgaggaataatgaaatgtgggggggtcggatgctccagaggatcgctgggctgtatcggtgcgagttcgggtcaggtcgatatgctagcttaacatgagcctttgtgatctgtgactttatctcaaccacttacagcaacaatccaccagttcttctccagctcaagcagaacgacccgcgctttgtccgtttcaacatattctagtgtctttccagctgagaagttactgtatattaagcacgattagattggttcatttgtgggggtttgcggggatgcctacctagcaaagttgaccatgccctgcgccagacctatctggcgcaaccgctcattctcttcatcttcgaggcatttttttgcttcgccttctgatgtggagccatcgatgcgccgtgcatggctcgatttagaagtatagaacacgatctggtccgctattgtctcgtcggtaggtccgagggacgggttatagatggcaaggtaggaaagttgggctggaatcaccaactgatgatcgctttcagacatcgcatcgttggatggcgttcacgggtcgtatgtaggtcgtaccagacaggcaacaacggtaatggctgaaagactgatccgaggtgggatctggatggatggatgttgatatcacgtgccttatcgataagctactatggaagcttcaactttctcccctgatggcttctcgacttttggcaattacccactagaatcatgtggattattccaggcccagggtgcctacatctctgcaaaagacccttggtccttcgagggcttgtctttaggtcatacgctaccaagacctccgatccgctccgcattctcttttgcggctctgatgaatttagtatcgcccacttgaaagctctccatgcttatcaattgaaacagccagagcggatttcctccattgatgtcgtttgtagaccgggaaagagggttgggagaggactgaagcaaattcgggaaggttagcttcactttacgcttccttgaatgaccgtgtatcctgattcaatttccctcagttccgctcaaagcggccgcctctgctctctcccttccaatccacgagattgatacattcactggatggacggtaataccaaaactcagcccaactgatattttcgctgaccgtggtagcccccaacctccccggacggtcatataaacttggtgattgctgtgtcattcgggctttttgttccgccgcgcatattgaatggtgccaagtatgggggcttgaatgtgcacccctcgttactaccgaagtatgtgattgctatatgttcagaatctccaaataagataattgacctgattgattagcttccgtggtgctgcaccgcttcatcatacccttatcgccggcgagaccaccactggcgttacggttcagaccttgcatccaaaacattttgatcacggagtgatattatcacagacaccggctcccgggttcgacatccccaatccagatttctgcaccgtccccgagttggtggatttcgttgcaccgaaaggagcacaaatgctcgtggaaagtattgaaaagggactattcgtccctcccatcgcagatgctttggctgaaaagtccggagatttgaaacacgcgccaaaaatcaccccagaggaccgacacatcaactgggcaaactggaccttggcagatatcaacagacgtaaccgagtgattggacctctctggagtaaggccctctgtgcaagcaatcctgcggatggacctctgtcattccaacagaaacgagtcatactcacgaatatcgaagaggttgacccgcctaaaggttctgattcgttctcaattctcccaggcctgccgtttacaaatgctcctcaccccgtcgagccaaggaaatcaaggcagctatatgtttttactgccgatggcaaggttctgcgcatcaaccgaatgaaagtggaaggcgaacaagatgcagagggtctgcgagccgctataaaagctcgcatgttcggtgatcgagcattccagtatgaaggccgggagttgactcccttccgcaactctcttgtataaatatgataaagttatgtgtactatcacctatatcttaaccaatacgattccgtttcctcatttcgatcagatcccaaagccggaatctagaaggattgtcagtttcgattctactcgctgaacttgagactcataccaatttgaactgcttgaccagttatagaagcattcttagccaatgtaacaaacatgtccgcgcagtcttctacctcgggctatagcgattcattagcacacatggtcctttcaagtcggcgagactataattgcttaccgctcgcttgagggttgtcgcatttgtccagccttcgatttgatcgggcgagaagcgttgaccctgggatgttctcagtattcatcgatcctagcattgagcatgtgctacttacccattcggtgagtaacaggccggggagaatagcattgacgcgaattttcgcgccttggctcttagcaagacacttcataagatggatagctaggcgatgcagagtcagtaatcaagcagcgtggtttgttggaatgatagcatacatgctgctttcgagacagcataaggcaagctgctgccacttggcataacgccctggaaagaacccgaaaatcagcattcgatgtttctatagcagtagacagtccaaggaaatttgacaagttttggtagcttactgcaatcgaggctgtgatgaggaagacacctccttccgggttcgcattgaacgtgggcaaagctgccttgaacaggtaaagactgctctttacattgaccgaccagcactgattcaatagtcagtcaaactaaagctcccactaccgagcatgcattcggtaccttgtcccagtcttcgtcgtccatggcatcaagatcgccgaaattggtcatttttgtccatcccttctcatgtattagcatttcgtaccataagagggattgattgtataactcacggcatttgagataataatatccaagccaccgagcttctcaatcgtggttttgacggcgttgatacagtcatctttgactccggcatcctgttttcaaatgcgagataatgtcagcgggtcaaatttagagaaacagcctatttacattggatttgagtgccttacgccttgaataaccactgtttttaccccatatttgctcgcaatgtccgaggcaagcttatctgcagtctctttgctggacatatagttgatagcaacgttgcttccctcagaggcgaacttctcagccgaaagagcacctagccctctgttaaaacgagattagtttattgatcagagcatattttcatgtttcaattgaagattcctaccgggagccaccggtgatcaaaacattgcgacccgacaaggaatagggcatgatgagtaggagtttatctttgagatcaagctcgattgctttgtttcaaagcgaagagacagatagacacaagattgagatacacaaaaggttggaggagttgccgaggaatattcgatgcggggtagagccgatcaggtacatttgacattttgatatttgacgatcaacaggcggagcttcggagaatcagaaagttatattgagctggatctttcagtgcagacagccacttacatagtgactatttccccggaattttcctcggtcgggatgttgcttttatataacacattgacgtccattatttgggatttctagatctgcattcaacagtccaagatcctatcttctatgatcatcgattatagacttcttacgctacagagtctagatcccacattgcctgtcaaccgattcatttttcacctaggtgcctgatgagaacgtcatttcttatgatatctgcaactatcagatcacgataattttaaaatagaccaagccggtgtaaatacacggcacttagatcacaagccatcctgcatattgggttctcttcatcccccaccaggcccgtcgtccggcctgggcaggccattggacaagaaaacggtcggccagaggcaacagcaagacaccagaggtactaagcgagctcacacgggcccacgattcgatgtaaatagtgcgtagctttggtgccaatgcgaacgaggagactgttcgcagacccagacacaaggcagcgcatttggccaaacatagaaagaaacgaatgagttttgcgcctgcgacaacgcagactgctgtagcgggaccgtttgtaagaatcaaatcagggtagagtgagttgtattcatttgggagcctttgatccgggtgaagtccccgaagaacattgagacaagcccagaaacatcgaagcgtggagaatggcgcggtgagataggattgatggacccgtcgggcacggggcactgtgacaatagtgtagttcttgttatgggtatggccctgagaattttgtacatgttgagcctcgaaatccttggctttgtctgcgctgaagttatctccggagctcacgaggtatgtccgatacgtgtagatttgagggtcgaaattcatgcgctcgagcatgtagagcatctcagctgtgtgcccaccacttccaagtacaaccaacaggtgggtaggagatcctcttgggcgacatttggagggaatgatattctgggaaatcgtgagcgagatgagtagaaactaggagagatagacaagttagattgattcaatggtacgagtaaataatacccacgagaagaatgctagccccaagtgcaattgccaggacaaaacaccaaaggagcaggccgccgaaggataaagaagcaagagagaaggacatcttggactgctgttgtatggcctcaagagattggtaagacagcccgaggattttaatgtagcattgtcataagaatgaagccgaagaacaatagaaagagaaagagaaacaacgccaactatggcaaaaggcagtcgagcgcaagtccgcaagtgtagatctttggataaattggagtcgcggtacatttatacacgtcccccgcacgtgcaagctccgacttgttttattttcctctttggcatccggaaatttctcccttgtttacaccaacgcttttacttgtgcttctttccacgttactatgtcatggcttctctattttctaagcgtttgacatgcttttattgcggacagcggtccgctcgctctcatcacgggcctgtttgcaatttccgctgtgaacattgtgaggctgacaacttctttgacgaggtaggctcattaagaaatcttttcactggaatatactcggactatgctaatgactgtttgccaaaaagaaaggagaaattacagacccaccagctgtggtcaccaacgcctacgcgcctggcgcatcagactcacccttcgaatcgactgacttcggtggatcacagttattttgcgccaaatgtactcggaatcagcatttatttaccagctccctagcttcctacttccccccctcggacgatcccaccgatagcgaatacgaacgcgggtatgagcagttccgcagaagcctagaggaccggtacccccaggtttgcgagtcttgcgaacccattgtgaaatcccgtatcagaagagctggctacgaagcgaaatcagatcatctcaggcgcatgatggatcaaagccgagcaaaccgagaatcacgacaggcgaggaaccggagctggagaagcttgcttcttcttgcgggcgcacttgcatattgggctagtattgctggtcagatagtgtggaacttgatcagtgtagctaccctctaccaaccctcgccaagtttcgattatttacccgagaccgaacgacctccaatggcacccaattctgtgatctcgtgcgtcaaccagtctatccgttcacagcgcattcccagtgaatgttcccctgatctagcaccaactgccggtctggcattgattgcaggtgcattttcactctggtggaatccgaagctgcgcatgaagatagacggaatgcccggtaaattccgcggtcttgcagagtactatcaagctcaactcatcgtcatggtggtacgatgtgttttctgggcagtagtcaaggatccgtctgccagtgggttagaacccaaactgattcctgccttccatgccttgatgatggttttcactattctagtaagtatatttttctccttgaactttccatgcgctaactatggtagtcggttttgttctctcgatatgttgtcagctactctagtcgtccactcgtcaattggtctgataatagctgggaaactcaattcgaaagtcctaaggcgtcttcatctgtactgcctgagtcacctatgtcgactcgtatcacaagatctggcggaacaccgaaggcaaacattggtggattccagcagcgcttcccaattgataaattggcccaggcccaggctcaatctccgtcacccgtcgagcagccgcttatggttgcccccaatctgacggataatgatggcatggactggtctccatctattacccataacctccgaccgaccgtgacacggcgagatcagccgtctgtgctcgatggtcctcatccattccaggggcagatcccagcagccccgatgcctcctgcgtggaagcttcgcacccagacttcaacaaagcctatcgaacaagtgattcaacctaatcccttccaccgcagtcctatccaaccgcaaggccaatggcagcaaaagcatgctgatgccgaaccagtgttcaaggaaccgaaatttttccctcctcatgatcatgatacatctactgggctggaaacgctgtttgaccgtgccttcaatctccagcccgatgctgcgcaaggacctggctggtcccagcaaccgcggaacaagggctcgcgtgtcgatgcgacacaaaatcagctcttttatgggtgtcttcgactaggtctgctagtcagcttcattagcgcatggactatctctcagaatcaccaggtcttgattccaggaaattacgtggagatcgctgcgctaggcgtggcaagccttgttgcgggattcgctttgatcacgatggtaaaaaggcctcttgcgcaatggaatggcatggagattctgatttctatcaccgaacttggtgtcgctgttcacatgggggcccatttgcccacagtttcgcttaatcgggactacttcgatcgctacggtaaactgctccttgttttcatggccgcacaggaatctatgaatgtattgtccttctacaataaggctaaatcagaaagccggcagcactcagagtctgtatcaccacagccacagccacaatcaccgcgtcagagtcaactgggtgcccttgactggtccgcaagtcaatcttcatccaagtctacacctgaacctcgagccagcagtccgcctgtgcaccgatcattcgagtcgcagctacccgttcctccactttcttttggcgataccgaggcggcctccagtttctcttcagcattaccttccgtgccgcagtatgggcttgccgcgtctcgaaatgtccactcgttcccacctaccaaccagagcgtcttcaataaaaacagaaacccacatagtttcactatggaatctttgaagcaaatcgagcctgtgtctgattatgagcgggactcggacaccgagactatcgccaccactacaaccaccgccacaaatttcaccaaccgcaacattcggtatgggaatgaccccggtctgggttcgagtgccttttattcaccccgacggaatggtcttggatcaggcatgggcggtttaagcttggatgatgatcccactccccgccgcatgactcgcagccagacccagcgtgggttacttggtcgccgtccgaccaactacgtccgatgatttctgtttcactttacttatccttccgttcttttttgtagtcaccgtttagcttcttcggtaccactggccattctatgtccctatcattgcttgcagactcgaactcgctacggcgttgatcgattgagctagtcggttgctctctttctttctctctttctgtttctactttcggtcttccggttttgattcaagcgaatctcatgggttcatagcgcaggcgaatgtttcttttagttcgatatcgacgggtttagctgcccttcaaggtgttgggaccgctgtacatatctttcgagagggttgaactaccccggtactttgatgatgtctatgaaattacgatgacagatgtgaatactctttgaaaaaatattgattttgaatttgatcccttacgttcgttcattgaagttccacatagacttaaactaatatccctactcattcaccctctcaacatgcaccttggatggcttgtccattccagcgccaatagaagctcgctctgcatcgacattcttatgctccagcagctgcgtgacgccaaagagctcatccatcttctcaagggacaaacctacaggcacaccatagtcagcaaaagacaccattatatactatcaaaggactcgactcacccttcgtctccggaataaagaaccacacaaagacacacatcgagaagcagaagcacgagaagataagatacgttctgtacggcccaaagtcagcaaacttacaatcgaaagcacaagccaaactcacccataaccattggcaccaacagtggccagcatattcggcacagccctggcaacaacaaagttgaacaaccactgcgtagcagccccaaaagaaacattcagtgagcgcagcctggcagtcgggatctcggagacgtaaatccagcagacgggcccccatccgaattggaaaaatgctgcgaacaggaaaatgcacaccagcgcaaaatacccggccgggatgacaggtacgccctcaactggcggcgcaatgcgcacgtacagtccaatgtacatcattgccaaaccctgcgcgatcgaggtccacaggagggagcggcgtcggcctagcgagtctgccacgaatattaggaacacgccgcagctgatcatctttacgatgccgtagacgccggttgcgaagaggttggttgcgttaccggttacgccgagctgtagaggttagcatctgattgtattctcgggtttagggcttaaagataaaagtacgggctcacgttttgaactgcgactgttagctcaagaatatctcaacagtttattgggatagtagcaacatacaaatttggggagcatagtagttaatggcattagttccagtcatctgctggcaaatcatcaagacgatagagataatcgcgcgcttgcgattacccggaatgagccacatctctttcatcaagtcccagaagccggacccagcgacaagtgcgcgctcctgttctagctgggtggcaatggccgcgaactcctcttccacgtacgggtggttggagggaagattgcgcacttgggagagagtcgcacgggcttcttcccaccgatcttgtttggccaaccagcggggggactcgttgcacaacaacataccgaagaatagaagtattgcggggagaccttgcattgccagtggaacgaggtacattgcggggccctcgatattgagcagcgagccgtaattgatccagaatgcaagcatgatgcccattgtaatgaagagctggtatagacctgttagaccaccgcggattgcgcgcggtgcattctcggagacatagagtgggttgatcatggatgcggcaccgactccgaagccagtgattagtctagaggtgtggttattaacttgagataatgggtggaggactgggggcggaaatatttgtcttaccgtccgatgtacatgacttcgatgtggccgctggctgctgtttgcatgacaattccgagtatagccaccaccgctgcgccgattagggccattcgtctaccccatttctcggctaccggggaggcaaccagagccccaaagaaacaacctgcttggagcgtggatactatattggccgatagatttgctgccgcaactttggagatgttctcgaggccgtatgtcctgcagcaagacactggtcaacatagctagacactagcagtctattgagcagagataacacacttcttgaatcctggcatagttagaactccgccaataataccggagtccatgccaaaaagcattccgccgaaacaggcctgggaagcattagctctataatcctagaattattgtcattgcgatcgctaaggagagactgaccgaacatgcaagcataaagaccctccacccatagatctctttagggtcttctttcatcgcctcattgtgaacaatcttttttagaaaccatgacatcttggatagaagcaaaaggaggcaagtcaagatgatcgcagtgaatccgaggggagtagctagcttaaaagtaattctctgagactagctcatgacaaagctaaactttagatgccgtcgacttttgatatgcatataaaagaagagaagagactatgaccacaagcctatgggaggtgtaattctaagcccagttgtcttggccggccaccgagcggcctacggaacaaaagcagccccccgaaataaggcgagcagacatgaatgaaaacttccacgaatccgaagcctggcacgggctgcagaaagctactacagctcacatggctagggtgtttgggggttgatccgaacatgattcacgtgctttcagataggagtgcagttccagggtagtactttgtatgtgctgatttatcggcgatattccgagcctgaaaaattacaggaggatagatagctttagccgagaaagagagaggagaaacttcgaaggcttgaagttgtcggctgttgatcttaccccggactgcggggaaactcaaaatttaaggctaatcccaatgcggcaaaacaatccagaataggatgagaccttgaaaccagaaaccagactgattcattgcacgatatcagattgtaatgtctgataggaatcaacttccttctgcactttccatcctcttccgtaaccactcaggaataactggcttcttctcccaagctgccttccaatcacgttgacggtctggcacagcataaacagctgagacgaaccagcaatcctggccagctgccaagcccactgcaagtgacggcaaaagcgtacgtccgtgaatgatattagagttgggatcagccaagacgatccgaccaacgcgcccaatagccgaatggagctcggcgatgccaacagccccagccgacgaaaccacaagtccactccggctgtcatgaatcgtaccctctgagtcattttcagtcataggtcccaaggtacgaccattatcgctgcgacatccgtaaatagcaaaggcaccttcggaggtctgcagagcgcgaccggtgcgcacatgatgagcgcgcagatgccaattctcggtttccgccgttggtggaattagtatagtctctatatcaacatctggccacggtttccaaccagaaacaagaattggctgaccattgggctcgggttcctcgaaacgcgcatcaagcgctagccgtctagtctgccaaatatcgccgccgtcgtctgataaggcaagcatgctgtctggggcgtgctgttctagctggtagccacccgttggaaccgagtatccaaaggcagaactgtacgcaaacttgccatacttggcctgtgtcgctttgagggggtagtggcatgcttgaccagatgataacaggaacgagtgtcccccacgacggatggcaatatgtttggggtattttagggcgaccacttcaggcaaagaggaatttgggtagggctcctcttgcgcggaccagaaggggtgtgtctcaggtagtgccagtggagtgaacgagagacagcaccagtacggtgacccgggagaattgtaattctccgttaggtacatgttagcataagagtagccgagactcaaagtgccatcattgtgaaaaatgtcatcctgcgtagaccaccaccggaagtggcgaagtatgattccccttaccacgccccatgtcaatggttccggtagttcgacatccgcgaagcctaatgcaccccaaaatccaaccatggcaaatcgataggtcatagagcgtccgaacgggatggcactgcctatttgcttgtacgtctagtcaggacaaagtcgcatctcagaagaagggatcagaaagacctgcccaagacgtaccgttaggatcgaagtagtgcacaaaatctgtagcatactcccgtgcccgctgacgatagcgttcagcacgctcaggatcgaagtcacccgccagcttggaataaagaagctgcaagaactgaatggcgaatgagcccgagtagtagtccatctgatgatgactcttaggtccatcgttgctccatccccctccaacatggaaggtatccaaatggtccatatcagcctcaatgcgagacgaagagtattcggcgccattttttctgaggcccaagtttgcaaagacgcggaaccatagcctacagccgtcccaaccgtaattagccgacttattcagtccacaccaaggaaagaccctactgggcaaatcgagacataacataccagttcgtatttggcatctcgcgcgcattaatactcgccaaccatctaccaacattccccctctgcttcgccgtcaatggatcccaaaagacatgaggcgcaacagcaagcgcaaacccaatcggacacatctccaccatgcgctgatccatatcctcgatatggccccagaactccgggtgttcgggatcagtcccgttgatgattccctggcgccagcgctcggcctcgccgtattcatatccgccgcccaacagcgaggccaggccccatagcggacgtgcgtatccctcgatctgggcgccgccttcgtcgaatcgtgtcgtcgatgtgcctactttgacgcgtgtacctcctggtgtaaagaggggtactagcgggttgagaatggcgcgacatgcttcttgtaggtcggatctagtgcggaagggggatttgctgaaggcctgtgagggggttcggccgttagcgtggatagacatcgtaagtctgtaggcctggaggctgtggggaatttgtgttgttatggtagctattattcgtttgatatgttattataggttttatagagattgacatcgggttaatcgccgattattagctgcttaatagatacttcatatcggggttcgggtgaatatgccgacatatagtaacaccctggacctgaggccatcttggtacaaatcggaattcgctgagaatgccgatccagccagttggatctgtgcgtagttttgaaggatcctggggttagcggggggtttggattcagccggtcgacgtaatgtgtggagatcatcagtaataagaggccagtttgttcgaaataggctgatgagaatctgataagcgggggaactatcgtccaccaataaggaaacaggctaagcaaccaatagtgtggctcttgtcatataggaggatatcacatggtattattgtttgtacatagggctcaacagcactcaatatctatacacgtctcaaattgcatgacaacaatgcaattggacatctaaccacccaataggccccccaagaatcggcccagctctttcacaagagcatcatcgactccctcggtctcaccaagaccctgttttaggatctcggtccaccgggccagggtaatctcgtgcagtttctgtccgttcaatgcggaatggacacggctggcttgatcggatgcgatggagtcgtcagatgagacagatatgtggctttcgacaatagcgccatgctgcagacggaggaatgcacgagtactaaagggaagtgaggagggaagtggcgggcgttcacgaggatcttcctcgatcgggtatgttgagaaagtgaaccgcggtgtttgtgtgtacttccactccaacgaccgcaactcggcaattcctttcccaatggtaggcacttgctccccttgtacatctcccactgtaccagcaacccaagagtccccagcgaagacttcaggttcattggcatgagcacgccgtgccctgagaacagcatccggatgtacctcgtagagccgagcaaactgctcgatcacaccctgaaccacgccctgcatcgaaaagaacgagtcggccaacgcagacgagacattcccgactggagaacgaacgctttcaacacccttagcctggatatacgggcgggcggatgatcgcaggtaccggccaagatcatgaatgttcggggaatcgagcaagcaagtgccatgatggagggctcggtgtcgagtaagcttaaacgcagatccagagatcttgcgtgtcagaggctcgttgggatcattttccaatccctctgctcgggccatgacaatatcatgccgttcattgacactagtgttggtagccccgacctgatgaagtgcgcgcaccaccatctcggcatgcttgtcgcgcgtaaacgaggtccgcgggcatataacgctgtaattcaggttgccttcatcgtgaaatacagccccgccacctgatcgccgacgcacaaatactgcagcttcgtcttctccggtcgtgccgttccggtcattatgaagtgctcggagatctgtctcaagccatgggttctggttgcgaccaatgactacacatggtcgattggcatatagaaataaaaccgtggactctgtcggggcgttttctagtaggaagtgctcgatcgaaaggttcacgtagggatctgttgatagcgattggtagatctggtgtaaagaggaagggcggctggcgagctcggcgaattggtgagcgggatatgacgaattatggcggatccagccatattttagcggattagtccaaggtgccgaagacgaggaacatcctcggagggcgagcattggggcaaagtggaagaggttatgagcgcatcacgaaagttatgggccgatagtcggttgcgctagtcccagataggaatctcagcgatgagtcgaattcaatttcctttttttctacttgcggtcagccatcaccactgttcttctttcttattctgcagtttttattgatctcaaggtctttgaacgtgtaaattatcttcaatcccttgcgactatctttgaacgcccatcatgtcgacgtggggtcaatatttccgtgtcaccacgtaggttacccacccctcacaaaacacattgttactgacacccacaattcagttatggcgagtcgcactgtcgctctgtcggctgcatcgtcgatggatgtcctccgggattggaactcaccgaggccgacattcagccccaaatgacccggcgccgtcctggccaaagcgctctcactaccccgcgggatgagaaggaccgagtcgagatccagtcaggcacagagttcggtatcactcttggtacaccaattgccatggtcgtccgcaatgaggaccagcgccccaaggactacggcggcagcacaatggacctgtaccctcgccctagccatgccgacttcacctaccttgagaagtacggcgtcaaggccagcagcggtggtggtcgcagcagtgcccgtgagaccattggtacgtcatgtgtaactatcaacgccagaagcgattactcttgctaatccaattcccacaggccgtgtcgctgccggcgccatcgccgagaaattcctcagcctggcccataacatcgagatcgtcgccttcgtatcctccgtcggcaacgagcacctcttccccccaacccccgagcacccctccccctccacgaacccagagttccttaagctgattgagacgattgaccgcaaaaccgtcgacaccttctcgcccatccgatgcccggaaaccgaggctgctgcgcgcatgaccaaagtcatcgagaagttccgcgacaaccacgacagcatcggtggaaccgtaacatgcgtgatccgcaacgtgcctgtgggactaggtgagccctgcttcgataagcttgaagccaagctcggccacgcgatgctcagcatccccgcaaccaagggcttcgagatcggctccggcttcggtggctgcgaggtccccggctcaatccacaacgaccccttcgtcgtcaacacgtctgaaaccggcagccctcgcctcaccaccaagactaacaactctggcggtatccagggtggtatctccaacggcgcgtccatctacttccgcgtcgcgttcaagcccgctgctactatcggccaggcgcagaccactacttcttacagcggtgaagagggtgtcctggaggcgaagggtcgtcatgatccttgtgttaccccccgtgctgtccctattgtcgaggctatgtcgtcgctggttatcatggacgcactcatggctcagtatgcccgcgagggcgccaagaacttgcttccccagaaggctcagactattcgtactagtcctactaccgcgcccaatggtgctccttcgttgtagacgggaggaaacctgacaatttattaaaatgttatacgcaagcgtcattaagaagggtcacgtctatgtctatatacgtatttgatgtatcatggagctacaaaagtgttatatagatgccatattcatacatttaccaatttcgggaaaatctacaaaattgtctaaactatagttattactcttaaagcctcaagaagcctcaaagcaagacatcaattttgaatttgccacctaatctaacaagcgctcactcggaaccgaagaatcacgaaaaaaagggaacacatggattcatcagaaaaatcattcttatctcagaacggcatcaaaacatcgctgtggatatcgaaacgacagaaaacagcagccacccacggaaagcagtgtgacaaaagtaaagactccaagcgagaaaaccacaaacgcacgctaaagttgtgtacaaacgacacaatgcaatgtaacacagcacacctctaggtgtctctcatagatgcagacaccaaaccaagctcacctaaccaaaaaaaaggacacaaaacaacaagtgagaagataaaaccaaaaaaagagaacaagaaaatcaggagaagaggaaagatgccagatctcagatctaggtactaactctccggttccctgtgctccaactaacagagcgctcagacatactatcaacatcgccagcagtagcattaacgacacgaagtttctctcgaggaaccgtgaaagttatctggactcgtcggccctcagcggcaccctctaggtcccaatcatgtacatcttcctcatcatcgccgaagccagcttcgttgcccagatatcctggcgcgccgatgaaaagatcatcgcgtgtagaccgagcagtgttaaacacatcgtctgagactcgtttacccgcattccagtctttggcgccctgcttacggcggaataactctgctgaagcgctgactgctcggcgcggggagctagggcccgagcatgtggattgttggtcagacccgagtagcgtgctgcggcggtcaatgccggaggcccggtgcgctgtgctagtggtactagcaccggagtctagctggctgtcggggctgcggcgggtcattgtcagggctcggcgcatggtgttaattacccagtcggcaggtttaggttttgattctcggggcagttttgaaggggatgagggtggtgagggtgatgagggtgtggtggggtcgaaggcatcaaagaggagggactcgttctccgactggcgatgggacatgtttgtcctggctgtagagtaggaatccgccgaaacagagttttccgagggggctacgccgtctggatcgctgtgtactgagcctgcggcgaggtattccagtgactggtgtccactgccccagctcagaggtcgatcgacaaggatagctcgtgcttgattgaccttgcctacaggttgggtggatgcaaaggagaatgtcgaggtttctgacagattggtggctgtttgttcgctttttgtcggggacacgggatccacagatccaatatcctttcgccggctgtagaaaggacctaggccaacgccgaagatggtgctccgaggagttgcgtagggggtgtctgagaagggatcttcgggctccgtcgtcttgaccgtgggtcttgtttcagctggagtgcttgccatgagatgttctcgtaggatctcttcatcttcctcgcgttcatcaatagggtggatatcaccagtagcatcactccaccggtattcgctgtttcgatatgagaatggcctattgctcactggaggtatcatgggggatcggttatttttggctagactgggagggtccaccaacagcccagtcctctccgccatgccttcgccctggactttccagttgggttgtgtcgtctggcagcggtttgccgaccaaggatacacgagggcatcccttgtttggctcattcctgagccccgaatactgcttgcttgtgttggacaatctcgaccccaaaagtgagatcgttcggcccccaaagcaagttcccgtagctgcgagtctcgctggctctttccacggcgctttcggtgatagttccatccacataaaacaatggctatagcaacagggcatccaatgcccagtccaacccccaagccggccttttgggacgatgaaagcttaccagaatgggggaaagcattcgaggaactggctgcagggttgctgtaagaagtaacccaactgctcgaagtcacattgtagagatagatctgcgggttggactgtgtagtcggtaatgcccgtttcgaagacgatttcgggatagtgtagcccccagaaatcatcatcacacccccagggagcattgccgctccatgtccgaagatgccagtaccctcggtgattcctaagccttcggaagagggtgctgtccaaatccattcagtggttccaccaaacccttccgcaagatccagaactgcaaactgcggctcagcagggacagtaatatcgcccacccaacctccaaacacaaacactttatttccatcttctgagagaactgctgtgtgaccggaacgaggctcgatagaaaccgtatcccgaacagtcagctcagtctttggcgtcaaattcgagaccgcagaaacaaagctccagctttgctgcggcagcgagaaaatggcgagttgcgacatgttgaggaacgcctgcctagtatgaccaccaataaacaagaaatcctgttgtttccccgtagaaccggcagcatatgtaggctgaagcggcacgacggccattccggcttcagcgatgggcggtgcgcgcttgccagtagtggcagcggtgaacttggtgttgtagtagggactcggccctaacacgaccgtcgagtgcgaatagttggctgcggagacccatgtttcgtccgtgctgttggcgaatggacacatcccaccaaaagcgtacatggagctctcgtcctcgttccgggatgccgaatacgtaaaccccgccgccagatagttcggagcggtttttgcgtcgctggtgataactggtagtttttgccaagtcccattgccgactgggctattgctgtttgggtggaactcccatagtatcggcttatcggatgcgctgtggcagttgcccgagtagactgtgatgaacccttggtcattgatggtggaaatgaaactcgagttctggtcagaactgtagaacggcgtgctcttcagcaaagtttgataggataaattctcggcgtcgatactgctggacaggttgagggagacgaactcggttccgccggtggagctaggtcggaggatgtacgcgagggagtcattgtgttgtggggaaaggaagatagaggacggagtgtatgggattgcagtagagggaccaccgagtgcaagaagcgcaagcagtccctttgccttccgatgcttcatgctgcttgcgatccgagacaatcagaagcagggatacattccaagatcggcgagcatgacatgccacgcgaagaagagtgtctatttttggacagtgcaatgcagatattaaatttgacaggtgtcaacgtggtcaacgtgaacggtaatgaaaaggtagaaaggtaaggagatattggaggggtaacattgtcttcagtaaacaagtttatcatcagacctgggtctcgcctgttctctatattagaccaatcatcaatcacccaagagtaccaagagtcacattcatttactcggctttgtttgcttgcactaaacaaggaaagagggaacctaaagtgttgccgcgagtcagatcgacggattgacttcgttgctgggcaacggcgaggtgattgcgtgtttcctcatgttttcaggtaaactcaagagcatctcctacatatgcagctatgcacaccaggcagtagcattaaatgtaatctaattaacttggcttgatttttctcaatattagaatccttcgacgttattcaaatctccaagtggcctttagtaaagccggtatatgtttcagactacatcaattcaatcgatctattaccagatacggggtttcgcaccttttaccttttacattttaaggtcgttcatcacggaacatcccgaggctatgtacgatctacacatgtatgcttaagttgtatgtagacatgcatattgccaagattaggagcggagcgcgctaaatccttgcctattcccattctagaaaaggatgggcaacaggaagagagctagaagattcttggaagaaatagcttgagacgttctagatatgatatatttcttgggcatggagactaaacatgaattaaatgtgaaaactcgctcaaaagttaagtaagaagccccaatttcaccattgaagcggttataaacgaatgtataagtggaatagacatgtcttcctcgtaatccttaacgtttcaagttgatttcatttctttttaccgcatagctaaagggtagctgagactagcaacttgcaagccgcagcgaattcctgcgatgataaaatcaccttattcctcaggctggtcaagatgatggacagcatgacctcctttccggcctgcttctttggctctctcgcttcctggctcgaattttccacgcgaagcatgaccgcctttcgaggcaatgttcctcttcagagtcgtcagtttgctgtatatggaataagacactgcttttactaacctgcttctccttatccatatgggcaaatccgccgtggtggctagactgtccaccctttcgagcaatctgctcgacctcttcgtgaggacggttgtggaaattaccggggttggggttgtcgaccattgtgaatatgtacaatatgtacagagtagtattatgattgtaaatagtttggaatgttgaaatgcgtgatccgatgccaaattagctacgtatttatacacaactccatatatgtaacgccacggggtggctgttgacagatgcgatggagtcactttgacgtctattcagccccgacttttctatatttgcctccactgagaacttgccatggcctcacaacgatccattcaggggagttttaaggaatattatcaacatcatcagaggagaatgtcaatgccaatttctattacatcgtgttatgggcccaagagcaagccatagcttcgtgttgaagaaaaccgcatcactatcttgtagatatgtttagttctcgaagagttcgaagatcgaagttctatagtaaacaatcctatatatccttagacaacaagataagcacatatgattacatattccatataattaggacctgagtcaaaagctcaatatgtccaaacccatggtagataaacacatggcatatgacctcaaacatagatagtggcaaccttgatgaacttcgggggacatcgtgtgattgcctagactcaaagcctaatgttgtctacgtcgatattcgtcacgtcgccgtaattgtgtcttttgacccaattcgtggatccccgcctcaatccaaactaatacaccaaccttaacatataacttatacgataatgaaaaccaattaacagcatttcatatacaatgtccgggaaagaggtccattgaacgtatacagccggcaaggctcatactagcgaatttatttcgtagagggattaggcatccccgaagtatcaggccacttacggaagaggtccgccagatgatccatcggcgccgttagaagccccacaactgtctcgtacggaggcctgtctggtgcgctaggatgagaacgcgaagggacgaacatcttcgttcgtccaaagctctgagaaaggccctcactctcctcttgagacaatgcgtcctccagtttaggcaaatcttcagtctcctcctctttgatatgttcagcaaggtcctccatcagctccctgacagcaggaacaaactgcgtatttgaaggtgtcatgttttggaacgccttcaattgcgttttaaccttgacccatcacgtcacatcagcactctgataggtaggtggcagaggagcttaacttactttctgatgctggtcacggtccttattggccatttccatgccaccggggagaagtttctcgaagagagggtaaacaacaagctcttctccaatggagtgtcgagctagttcccaggtgaacagattctggaaacgagtttgttcatcctcgtccttggaggtgattatcttgccatagtacgattcaatatcccggtgatcttttttgatcgtgtcgatgatacggggtgtcatggtagtaggagttgcaatcccacgtctctgggcaagacgtgataggagttgactgaaagtaggggttcttggtgcacaaagagcaaaagtcattgtggccttggaaggggagattcacgacagcaatctcaagttctcgacaagctggaacgtggactccttataccagatgtaaatttaggcacaggcaaatacagtgcaagtcttcatttgtctatctgcccgctagatcatactgacgtgaagtaaatgcatgtagtatagtaatggaagatatggtatttgctgcgatcctattcaagcctagacaaacccgaaagtggtaaattgatcttacgtctaatgggtgtcatgagtgtcatgtcacatttatataatcctcaaagctcacctgtgtacctaggcgcatgatcttggatatttatgatatcacatgtgattcgggcagtttctttgcgggaaaactatccgtcatctttgaatcatcaatgggctcttgtacgcaggtgcgaataagcgcctcgcagttagtgctttagactgaaaggaaagttttccgtcatccgcaccgtggtcatgtacccaatcaggaccatgtttcacagtgtacggtgctctgatccttttacaaaccacactacagttaactgttggcatggtagtttatgtctagttcgtctatattctgcctgttgggacaagttagcgttcagcttctagcaataggtactcacgagttgacatattcctagcagccctaagcaccctcttcaaccagcgatatccaaattgggcaagtcgcagctgcggcctaaaatccggtgcatacagctatatatgtagtgtcttcatgtgaaaaagaagcaaagtctcggaccgcaacaccccaacacggttctgtggattccccggcttacatccaatgttagcataacaaccgagctaacatttgactttcttgtatagctagttcgcatatgtgaaaatgggttgtctggatagtcttattgagagaactagaaaaggagtagacacatgtctaactatgaacagaatgtccattataagcgtggagtatgtcctgcaatcccaatggagctagcggtgtaaataactatctcgcttattaaaggcaactatacgagacccatgcatggaagaatgctcgagcggcggctaccatcgtcagccaccggcgttcggggacgttggtctcatggctacgagaagcgaaggggaaagcaagtatcggtggaaaaactagtcggcttcagccagtcgatctttacggataaatgagattggacaggtagttcatccatgctcggcaacaagaggcaaatattcgatactgcacattgccttgatgtggactataaatggggttccaagacaaagtcgccacctgtggacttgtatacaatcacatgtggaatgcaagaggctagaggtatcgacaaggttattctaatttatgatcaagtactaaacacctttgatgctcaccccaaatcaaaaccattacgggatagagatcaacagaggatgacaatctaaatcaaaccatattgcaccgtgcctgtgcataaacaccgtgcaatatagcgctagcccaccggtgtctaatttccggtgctccgctctgttaaattgtaaatccgactcgacgttaacacagagtaataaggcaccagggtgtgcacacgcccagtcgactgggactcaatcagagagggagaacaaaaagccaccttgcccctttcgtcacacagcaggatcaacacgagcaatttccctcaataagcatcagcgaagcccgaaatggatgagggatatagaattgggaatagtgttgtgcttcccgtgagctttggccatgctcgtcttcgtgtgctttgatcgcttttgcggtgtaggtggcgctcggggactgtgggtgctgtaggtacatgcatcgtggagaaagcagagtgatgttttgaacctggatgtggaatggcatgaaatgaagacgggatatgcagaataaagattattattttgttgaaacggtcaaggtgtcgccaaccacccggacaattgcctcacactccaacctctaggtcctttctaggattagcttggtttggaatcgcatgcatcggcgccggaaatggctgcagaacgtgttgtctcggatattcaggccgaacttccattgcgcggggcaaactgtacaaccatggtaggaatgattggtaattcttgcacgctctacccctgtgctataggatgacgagtatcgctcagaatgcggaatataacgattgatcagccttcttcccgctctacatgcgacagcgagggcatctgccccaatccactcggctacatctcctgagaaacgggctcatatactagttcgagggaataggtagactattgaaccccgcgattatatgtctaccgtagtttagccctcgatcgagtgatcccccgcatcgtaagttgtggggcatagcgtcttatctggagtctggtccctgggcatctctggttccccggagagttctaatggcatgtcatgaccttggaatgcagataatgtaagtcggcaaattaccgatcgtacttcagggttacacgcaagaaaataaatcaaggacataggccaagacgatacaagagaaagaaggctaattaggggccagacccctatatgacgtcgagtatacggagtcgcgcacagataattttatgcacggacagcggatttcatgaggatttcctcccggaaagagcttcatgcaggacgcctcccggagcctgggagtattctgtagtatcatagtaatatatagtgttacagtatactatatggcatataagcttataacatccctataacatgccatatatatgtacaacaagtcggagtgtacaaagtacatccaagaaagagtagagttccatccatggatacacttttgccttttcttcaattgactgggacgacataaaacggcaaaagacgtccttgatacaaccccttataatacagcttccggtattagggcccagcagttcgggcagaagttatgagcgaatctacgattggaggtaaaatgatctatagccagcaccggagtaagatagtctgtctgtaaagatgcaggcctcggagccgagggagtcgagttggaataataaaaataaggatcatcacacggttgggcgaccatggtcggtcatttacctacttggcattctcacgatggcttccagtctaggctctttgcctacatactcgctgaaaactgtcatggtccatgggaattaggctgtccacggaagagtcctcgacgtaaggacccaagcccagtggcaaatccgccactgggaacaactacatttacaggatataatctgtatattctatattctatattctgtctataagatatgtattatagatgcacggaatagtaggagtaccagattaatctgcaaacagcgcggaattccagagctgatagccccactagatatggctaaatcctgaaatctgatatattcaatccccccaagtagatcaattggcagttcgagcgtatccctttttcctttttcacacttattttttataatccgccattcggttcaccattgacttggtaaacttatcttgtttcttggcatcccgatcatcgctctaccctattacccaacctcccccttcaactcttcaactctcccctcgactctcggtctctctacacatctttttctcttctctttctttttttgtaattcttacagctgcttggctgtcttgcctttcctttccacattactttcggatctcttattcttgattgattccgatctcgctccccccacctccacatcccccgagaactggccatccgaatgagccaaaccccgaattatttatagcatctgttgtcaacggcactccttttttttgactcatttccccacgtgtggatgtgggatcgtccataccctcgtgcagtagcaggtctacctcgtgtccttcccccctaaggcgacaacccgctgtccggtacacggtttccgttgccttgtcgccatccctatcgacttcacgaaagtaatgccgacctgtttgtgcgtgcaaacagagctttttgtcagctcaccttgaatcaattattcacgagggaaacccccgcaaaaaaaaaaaagagtcgaattggagaatgttcaattaggatgcacaactgcactcggcacagctgcctcagccccctccctttgaaataataccacacaggaaggaagaagggaatatgacagaaaatagatcctcgcaagctggtctggaggatccagatcagctggctcggaatcatgtctcaaaaaatcacaagcgagatctcagccggtccgacgagtcatcgcaactcccatctgcgtcgaacgaccaactcgagtatcgcccccaatccaaatcatccgcggaacaaccatctatcatcaccgatgtctcggaagctaccgcaactttccgccaggccttccccggcgttggtggtgctcgggccccctcgaatcgctcgtcgtcgagttccctacaagccctcaacgaaggtatcgtggtcgatgtccgatcggaaaatggaagcattggaaggagcactcgacgagcctcgagacactcggataatcaattaccagtttaccccgatcaatcctatgcctccctccagtctcaggtgcatcccacctaccaccctcacctcgccgaaccagatccgctacccagacactcctatgcccgtggtgttcgtactgcgggcaacactccgatatcgagccccgggctcttctccatgagacactctcgcatgggaacgccatccgcgtcggacgatgacgtctcgacgcgaagctcacttctccatccgtcacatcttcaaccaccgaaggaaacacacaccgccgaagttgatcgcgacataatcacgggaaacaaaaccatcaatcagtatgaaatccttgaagagctcggacgtggtgaacatggcaaagtgaaactaggccagcatattgcgactaagcagaaagttgccatcaagattgtccagcggtactccacccgccgtcggttaggcaaattgggcaacccagaagacaaagtgaagagggaagtggctattctgaagaaggcgcggcatccaaacgtggtcagcctgctcgaagtcatcgacgatccgaaccgacaaaaggtgtacattgtgctggagtacgttgagaatggcgagattgtctggcgcaaaaagggtctacgagaaattgtccacgtcgacaagctacgtcttgagcgggaaaagaatggaattccagacactcccgcttttttggaagagagccaccaattcattcgaacggctcagcatctgcggcggcaacgggaaagggctcgcgaacgcattgaagcacaggctgccgatgcccagcaagggccaatccctgcttggagtttggagcacggtgcggagtcttcagatgaggaggatgacgagtctggtattcccatgaggagaccatctgttgcagtaacagatgactcaagcccatccttcacgcaggacccgtctctaagtgctatcgagggcagcatgtacggcgcatattcagacttcccgatcgaacgacgttccagcacagcctctagtagctttggttatgcaccatctgaacccgagtggtctgcagagggcgatgacatggcattcgttccttgtttgactatcgatgaagcccgcagcgcattccgggactcggtacttggcttagaatatctccactaccaaggtatcatccaccgggatatcaagccggcgaatttactcgtcaccagcactcatcgggtgaagatttctgatttcggtgtttcctacctgggacgcccaatgcgggacgaggaagaagagcaagtgggcgagaccgacgcaacggagttggacgatgcgcgtgaattgtccaagactgttggtactccagccttctatgcccccgaactatgttataccggcgatgatttcgtggagactattgggtcgatccccaagatcactggtgccgtcgacgtttggtcgctcggtgttacattatatggaatgatctttggtcgcctacctttcgtttcggatgatgggtacagcatgttccagaccatcgttaagaaggaagtcttcattccgcggaagcgccttgtgcccgtgatggatgaagcgtccgactctaatcagtggaatctgagaaatgatgatgagctcgtctatgaggatatcgacgatgagctatacgatctgctcatgcgtcttttaaccaaagatccgatcaaaagaatcaccctgaaagagatcaaacaccacccctggacactccacggtcttcccaaccctcgagtctggattgaggagaccgaccctgccttccaaagtaagggtaagcgcattgaggtttcgaatgaagaagtcacaagcgctgtcagcaaagtccctttcattcaacgtgttcgatctaatgtcgccaaatggttcggcagcagccgatcgaaggacaaggaattccgcaagcgcacatcgagcacaacaccgtctaccgagaccctgtcctctgcctcaagtaacagcacatttggaaaaacctcccgcgacagtcatcgcttcagtttgcgaggggacgaggaattcttccggccactcaaatttggcagtcaaggacatccgcttgcccagagcgttactgcaagcccggtggatgaaggtgattgggcatcttattttgacggcgagcaaccagctgcagcaaatcttgctgctgcgactaagcttgccactccacctccacgccgacctggtcctcctcgtcgcgcacggtcttcaatgtccacagcagaatccgcaaagacggttaagccatccagtttcgatactccattgacggttcggccgttttctatcatcgaagccctaggtcctaccaacttgggtagtctttttagtggagctactcgacgggcatcacgaggcagtcatagtcggcgcagttctccgtctggcgagtcggcatctcgacatggggatagagaacgtcgctctgctgagcctagcatcgctgtcagcaatgcatctgcccatggccaagtgcgcacccccggcctgtggcatgaggagaaacactcttctgcccagcaattaacacacaggcgcaagcgatcttcgaagatcgaggatccatcagctgcagaatctctcaatctcacaaggaatgcactcctgcgtcgtagacggagcgatattgatgcaaatgaaggcggtactctaagagttgactacgcgatgtactctactgaatcgctccttctaccacctatcactccagctaccaaccaagggtgtgccgccgacactaacaacgggctggccacttccacctcggccactgtatcttcctcttctgccgacgacttcaccagcggcatgtctcagagtgcctcccaccccagcattccgtcggtcgtctcaaacgcatcgtctctttccggtgacggttactcggtcaagggaaatgacttggacgaagtaccctctatgctccgaaccggggagacactcaaaccccttcgtactcatccgaactcgcccaggtcgtccgaagaggatgagtcgaggtactactgcgatgacgaggacgaggatgagtcggaagatgaaggccttgtgattggaaaatgcaagcctcctcccaaggctgccgcatcgaatattccgtcgcagccatcgaactgaaatgtgaccggtcccgatcgttccagtccagtccatcgttccagtccagtccacctctttacatttgatcctccccgcctaccgcattatcacccaccacttcctccatccctcgacacttccttaatatacctagtgaagttgttgtatatcatcgaatatcgttttgatactctttccgttccggttctcggcaggctgatatctggaaattgttcctagaaattgttccatacattctacatggtctgtacatatacatgaacacacgtggatatccatcgatgcctccctgtgaagggcttactggtgcccaccgaccggctgcgtctgcatgtctcttctgttctgttctgttgagttcagtctctgtgactatgaatctggagggcagagagtcccacagtgcatttcatgggtttctcttttctttctctttccttctgttcttctttcttggtcttatgcatgaatgaggggccagattgctttttattttctaactgtatgtaatgttgactctgtcaaaaccgggcgggttgggttttggtgccatattttggattccttgatcctcgagggactgcagagtttgtctcttgtggaatttgagcaatcgcgacatgacatgactgatatatgatgctgggaggcaagacgtctagcgtgtgatgaagaaatgaaatatttggggttctgggacttttggttgtatccctcccctaagacgaatttgttttccatatattgtagaacaccccttgtacggtagtctccaaccgccaatgccttatatcagatttcctccgagccttttctaagacgtaatggagtttccttccgctttctatggaagatagtgggtggataatgcggaatttgggattagttgcgatgataaaatttccgctgcttggtcgactgacatttgatgaattaagggtttagccatgtcagatttgatacctagctagaaccagaggcttatgcaaggagatctgtgaagttaggcaacagtcaggaaagccaggaaagatcgaatggaatgtacaagtatagacaaggcagactgttgaagtgcgccttggccaatagcttatatcctgcatacctaaataggactagcgcccatgggcctcagctgcgtggctgtgcaaaagctaaagccaagtcttctttagcgctgacccctccactttgggaagatcggggaatgcctcatggcctaatatgtgtatattcaacaggcagcgtcttttttttcatttcaatctctgagaatttgtataaaaatagtctgtgttcgtctatctgttatcagggtggacactgataatgccaatgtggggagagatctgctttaggaggaaacttgtacggagtagaagaaggtgggaattcttccttttactcttcgcgcttagcccccacagggaaatattatcggaatatcatatattaaatcaatcatccctacgagagtcctccgtacagcattggagtctacagcacgcgagttgctatacgacaagacgtgtttgacctagaccgccttgcgcacgtgaaaacgcctgaccttcaactcctccctcatttactctctattgcggacatctcgtcaaactcaaggtatccttgctcttagagatgatgaggcagtctgccgaccgctgacaactagctcagaggctccttcgcgtaccggacccgattctggacccttgcgaatgacatcccactacgtcgtcagacaccattcttcctacatcaccgggcgtccacgaccctgacaggcttgcctgtctaatctgccccgtcgctgaatttctgcgctatattctatccctgctatccctcgtctctgatcacaggttcagcctggccttcgtgaaagagcccccacccacgcgcattcgcaaacatgacctcccatgaccagaaccacggcacggcctattgtccggagcatgaccagaaccacggcgcggtctattgttcggaagatatgaagcatcggagcataagcccttcgccgcacggccaacaatatcacgaccccaactccggtggattaggagttgacccctcctccatggccgcttattccacaaacctctcctatcagaatcccgacggcagcattggcggtgctgagatatatggatacccaaactaccttaccggggcgcctttgacacagacattatcaccgctggggggccagggctatgctccaaccatcaataccaaccttccgatatcgcagtcgttcgagacaagcctggtcaatcagctcgagcactcttcgacgggaatgagacggatgcagggcgatgaaaacttctccaatatgctcaactccaatcacccagaattggacttctctctctaccagaatcacagccccaacagcgcttccacccccgagtacgattcttcgttattgctagacccgcaaatgcaacagcatcagtctatcaaccaagcgataaaccccgctgatctagtcagccccatctccaatccttctgtatcctcgcatccatcacaagatcagcaacattcctcacctggccccatgtcccctccagggtccacgccgggtgcatactatacccctcggcattcacgacacacttcgcttgacccggctactgcggcgtatttgagcgcccagtcaggtccagactggcagtcggttatgaataatgtttccttccaaggccatcgacgtgcaccgtccgaggtgtccgaagtatcgtcggccagccactccccttatttgtctcagcacgaattcgatggcattgagaacaatgcatcgccttctttgattccccaaaatgatccaaatctttacgacaatggcctaggcatggaatcatttacgttatcggaacagcatcagcaggggatcagtcctctccacagcccatatatctctccgcggttgatgccacaacaggggaatgagatggtgccgaataattcatatctcactcagttcccctctgcgccgacagacatgtacggaatgccccaagaagacatgatgaacatgggccaattgaataacatcccgggcgacattggtcaagcttcacagatggctcctccatcgatcaatgttgagtttgccccgccatcacgagctccaagcttcggcccagccaaatcaacggcagactttgactcactgagccctccggctatgcgtaagtgacgatttacaacagtttgattcgtacgatactaaacagaacttaggatcccgtgttcgtagcaaatctgatccttatcaccctgcttcccgcccacgctctcctgcaacttcagcagcttctctagggccccgcgcacctgccaccccacgatctttgtcccctgttggatcgattggttcgcgcagtagtcccagttcgcgagatccctcgccctcacgatcaaaccgacgcctctccacctcatcaatcgagaaccggaactacatcctagatctcgccgatccacaaaggcccggagcagtacccggggagccaaaaagaattcagaaacacccagctaccttccagtgcaccctatgtccgaaacggtttacccgcgcatacaacctgcgatcccacctccgcacccacaccgacgaacgaccatttgtgtgcacagtatgcggcaaagcattcgcacggcagcacgaccgcaaacgccacgaaggcctccattccggcgaaaagaaattcgtctgccgcggcgagctctcgcgaagcggacaatggggctgcggccgccgcttcgcccgtgcggacgctttgggccgccacttccgctccgaggcgggccgggtatgcatcaagcctcttctggatgaggaatcgcgagagcgtgaccgcgtcttgctagagcaccagcagcaacagcaacaatcgccatccggccatctccagccaatcccccagccgctcgttatgcccaacatgcccggcatggatgggcaatcgacgggcaactttattcttcctgctgctcttctggcgcaatacccggctttgcagacattgcagtgggaccagatttcggctgtgggtgatgatccgagtgatattggtgggcggagtagctttgatgctagctctggtggagaatttggctttgacgaggatgattcggggatgggcggttatggtaataaccaagggggtatgtacggtgtcgataactctggtcagatgctgggggtcaattctggggaccctgggtactctgatcagaagtggactggatgacactggttctgcttgctgtctgttccctccttctttcttcctttcttcttcctattttcttcttttctctttttcctgctattccaggtttcaaaaggttattgcatgatgcattcatctgcacaaagccgattcttttgctttcgatgctgccagtatagaaaaggcttgttggcgttcatatataggatgctctcggagatgtctgaggatttccgaagctcggcaatcaggacatatgattgtcttggtgttttgtttttctttttctggtctttttagacatcggtgtttattatgccgtcttttgggtcgttctccttctattgatctcccgacttcccctttgcaggtggttactattctacccatctcattacttatgaaagaaccgggcatcatgatgctcttttatgatattcccatgctcgtttcatgcccaacttcttttcttccttccttcctttctcttcttctatcatggattctgtctcgtttcgatgtcacagcttcaacactatataccataacatacaatggatggctcaatcgaatgacttgaatctctcggtttagtacttatttactactataccaacttggttttgcacttccactccagtgaaccaggaaacagtagaatacagatcacattggatatcatctagtcggcaaaacaaatataaaaccatcaaaattcatcatatacaaggtgagaggactacaatatgtactccaaccaaatcatcaactccagatcgaacccaacccatttttatggtgtcaaaacagtctgcaatccacctccacctgctccactctctctttaagagtgagccttcttagccaacaggttcaaggcactaccagcaaggatgaatccacactgatcctgactgaaagtatgctgaacagggacctcgaacacctccccagtcttctgcttagtgacacgcagcttgatctcaccctgtccaccagtctgcagcacatcgtaaagaccaacagtatcaaccttatcacaagcatcgatacggtcatagtcctcacggtttgtgaaggtaagaggcacaacaccctgcttcttaaggttcgtctcgtggatgcgggcaaagctcttagcaacaataacccggccgccgaggtagcgcggctgcagcgcagcgtgctcacgcgcagagccctcgccgtagttatcctccgcaacaacgagccacgaaattccgcgctccttccatgcctctgctagctccgggatcccgtattgcttgccggcttcgtcgtaggcaacgttcgtctcgccggttgcggcgttgacggcgccgatcagggtgttcgccgagatgttgggcaggtggcccttgtacttcagccatgggcctgccgcggagatcgtgtcggttgtgcactggcccttgactttgtataggacctgcaggccggagagatcgcccttggggaagggggcgaagggctcgaggagggcgaggcggtcggaggtcggtgagacaatgacttcgctgcttgcgtctgggacggcggctgtggggaggaagttggggttgccttcttcgaaaccggcgctggggaggtcgaagccgctggggggctggaacttgaaggccgagccgtctggtgcggtcagggagtcggtcatagggttgaaggttgtgctgccggagtaggcgagcgcggtaacgagttccggtgaggcgaggaagttcattgttcggcggttgccatcgttgcggccggggaagttgcggttgtaggaggtgaagatggcgttatcttcgccattggggacgccgtcagtgcgcttccattggccgatgcaggggccgcaggcgttggcgaggacgatgccgccggcttcggagaaggtgtttagtgtttgatcgcggtcgagagtggcgcggatctgttcactgccgggggtgatgaagaaatccgccttgggcttgaggcctgctgcagtggcctgcttgacgagatcctcggcgcgggtcatgtcttcgtacgaggagttggtacagctaccgatgaggccggcaccgaaggtctcgggccacttcttctcgcggacggtgtcggcaaactttgacagcggcaccgagaagtcgggagtgaagggaccgttgatgtgcggctcgagctcggataggttgatggtgaccacctggtcatactcggccttggtgtcggcgcgcagcaagctcgaggggccggcggaggcaacctcggtagcagcatctgcgacgtaaccgcggtgggtggactgcaggtagggaaccatactaggcgagaaggggaagatcgatgtggtagcgcccacctcagcacccatgttacagcaggtagccatacccgtgcagctcagggtctcgacaccagggccgtgatactcaatgatgtagccagtaccaccgcgaacggtcagcttgccagctagggatagaatgatatccttaggcgaagcccatccgctgagcttgccctcgagacgaacaccgagaaccttaggagccttcagctcccaaggggcatcaaccaacgcatcaaccgcatcggcaccaccaacaccgatggcaatagcaccaagaccacctccgttaggagtgtggctgtccgtaccgagcatcatcaatccaggggcggcgtagttctctagcacactctggtggatgataccggcacccgggggccagaactcaataccgtagcgcttggcggcactctccaagaagtcgaatacctcactgttacccttgattgaagccggcaaatcggtatcggcaccacgctcgccgacaatcatatggtcgcagtggatactggccgggacggcggtggagggaagaccgcaggacatgaattggagcagagccatctgggccgaagcatcctgcatagcgacgcggtcgggcttcagcttcaggttggccttgcctcgaatgtcgcggccgttgttggtcccggtgagcaatgactcctcggcattgtccagatgcgcgtagaggatcttctcggcgagggtgagggcgcggtcggagccaagaactcggcggacatgttcaaggttgcggacaagcttgggatatgggggcatgcgggaggaggaggcctcggtggctaggccacgggcgaagagccgttgtgatgaaagccgtgtggccatctataaggtgttagattgttcaattgagattgtcttcgatgtatacataccccacgagaggcagaaacccgctgccaaactagctggctcaccatcttcactaatgttaagtttggggagaaactggggagaagataagaatgttccctttttttttcgtccggttgttatttgtatccgctgtgattggccggtgattgcgccgatttcggaatccaggcctctattatgtggggaaatagccctaaagaacttgtatctacggagtactccgtgaccatactggcgctactatgcatgtatgccatcatataagatgtcattattgcttcttcttcaaagaaaaagagcggtaccacctttcggctgcacctgtttagggctaaatcttattctcgatacgtggcggaatacggtctcccgaattctccttccatgtccaccattttcctagttttagcatcgttcggttttctactactcgctatgagtgctaagctcaacattctccagaaggacaaagccaccgagcctcaggcaggcgagatgcaatcctccgaggaacttccgacttatcaagagatcgcaaagtctcccgagaaatcctccgagaaagatttgctgtataaaacaaaaaatgctcagaagcctgaagaccttcttgtccacttgctttcaaccgaattgaatattgacgacaaaaaaactcttattcggaacgccccgagtcgtatatatgacagcgaccatcaccgccaaaatgccgagaaggttgaagctcagcttaaagacgcaggctacagccagcttgccatagtgctatattggtgtttcttttggcatggggtacagccgagggggccagaaagctggatcaaggaactgattgaaaatgatatcgagaggcgttggattgctcaaagaagagcccgcattcaagaaaaagtccaaaccttggaaacctcatcagatctacttctatcttctgaaggtgaagctgaacatgcctcacaactcgagttatacaaaggactgctccaggatctcaatagaagtcattgggctctttccagaaagagttggaacaaacgagaatccataaagagctggtcatttagtcgagcatataatatacaaagatcctatccagattggtatctctctacttcgttgagcgatgattgcgcaggacgaggcggctgttgcgggcggagctgcggctgctgtgaaaggccgcggacggttgatggattcgaagatcatatcggcaccagaggccattgtactacagcctgcagttgctgcatgaaggcccatggggttgaagacttggatgacttgttagttgaagagataccagacttggaagagctttgttttgagtacaagaagccctcttgtatgacacatcagagcctacggctgctgatgggttatgctttcaatttacccaaggcggaatgaagttaacagatttacaactagaatatgaggacctgtgaaaatgacgccgaaaataaccccttttggcgccagaaacggccgtctttccacccgtaactttggagggcgagcgggcgctttaccgcccaccgtccagtacgatcactattttgcacctaaaacttgtgtcgcgcttattgccccacccaaacagctccagcgcgtccctactatctagtgcgtccttatgtatcgtccagtacgtccctactctccaatgtgtccctactctgccactcctgcaggatcgtagacggctcgccgctctattcagggcactcagggcggatattcacccacctaagtatccttcaccacctgcatctgtacagcaaaggtacattttccaccatggccaaaaagttacaagcagccttctttccccctatatcttcatcactctaacctcgctttatcacaagcaagatgctttccaaacatgacccaatgttgaaatatgtgatcaatgttgggggtttcgggggaagcatagtaattatgaaatttagcggacagtgtttccacgcatggaatctcgttacagtcacaagctggttagtacacaattgccaccgaaacagctagacgccaccgtaaatgtacttgcggcggccgacgatccccgacaggtccgtacgaatctctgcccatgctcgcccacccgctgccggctgtcaatttaaccgtgccggtggccctcactttgaagtcttctaatgtatgcgccaactgcaaggcttgcaaggcttgcaaggattgatgtgataagtctccgccacgctgtcactactgtcctggtcgtcacggtcaagaaagcatttccaccttcagtaagcctgcgaaatacgtccatagaagccggcacgaggccagacacgcctcaaaaaaatgcctgtatttggaaccctggtataaaattccctaaggactctgggcaggatctgaagatattcttacgagcataccgtgctccttgtagggttattctagggtttctactgaacagaagaggctattgttcgcgaggccaagtgggctcgacagcgacagcgacaggcgatacaagctaaattatacgttcaagctgaagtcaccagaacgacagcataaatgaattgaaggagataggtcaagatctccaatcccttgagaatatttccgaggcatcgtcacctctactaatgactttatgctgcacttcgtctggagcagcaatcaaaccggctttacctgaatgcggccagtattacaaagatatcttccatcattaaatagcaaacactcataagatattgagattgaacctggagtttagtctatattttacaaaatccctcctccaaatcctttatacctagatgaagggcaaggacccgccggatttcacaccaaatgcccttccgtgcacttataacagcatcttgacgctctgttgcaagattgtaatggtatttttgtgccacgttgtctgagatgaagtgtaaatacccgaataaaatattgtgttcctggcaggcttgtgccaggtaaccgacctcgcagtcgacccagtccgctctatgcttattcttggccagccaatcctcattctcaaccaatgggcttggaacggtaacatgaatcccctggcaaatgtgggccatatgccctgctgatagggtggccgtgagtggacttttccaagagagagttttgttgttgaggagacttgtttcaccagtaacgagggcctggtttggaatatcttgtgttcgtaatgaaccagcctttcccacatatagaacgctggatatattgttctggtcttgcattgtgcgaacaacatttccgatgatatcaccccagaggctcatcatgcttccgacaaaagcgatgatactcccgtcagctcgacggaagtgcttccacgcaaataactgattcggctcatgtgtccctgtctcccaggggtaatcatgattggtgaccagttgatcaacataccctaggatgacagtatcaacaggacacataaaccgtaaattcgatttcgagagaagatccaggcaatcttccgaagaagggagtcgatattgtatcactgatgtaggcgcattaatcgagtttaggttgagataataagcgactaggagggcgtaatgcaggacgtagtctcgccccggaaaacacctaacctccagagtcgagtcgtcgatgatcactgctgttggtcgatgccagttgaaacgtttttctcgtttctcagtgggcgaaatatgtacattggggccgtttcggtcataatggccacagactacaatgtgaggccagacacgggtcttgatcaacgggtggatcttgccatcaacgtatgtctgaagagtttcgtgcatcagattttcgcctgccagaagcgagtcatggtctattcttcccacggtcatgctttggttccagccgagaatccaacgggcgagttggactgagacgagtgttgagaaccggattaagtttatcccgctcttagtttgtttactgtacaagaaatgcttgcgggcttataacatcgcctaaattgggctacttgttgtcttttgctcttcaaacttttttctggggcaaatagaatactcccatttagatatagtctatccattgatctcttttgaggcgctgataaatgtcagtgttatgatttattaatcttacatgatttgtaactaactagttaactaacgtattcggtaaacgagctgcgcaccccaaaacactatagtaaatgcaatatattccacatttatatctcaacaaccacgtctcaacttgctttcattacttatcgatagtcatcgataaggattcttagcaatatatctcaatttcaaataaatcagaaagttgcatcattgcggtattgaaaattacatcactgaactataggagatatatatatctcaatcactattatatcaaatttctcaaggctccctagagtgatcagatatcatatggagagtaatgggctacaagataaagtttatattgaccaccgttgttgcaatatcatgttgtaatttatcgcatttactatgtgttttggggtggccgactcgcttgggaaatacgttatggggcttacagctgactaatgacaaaacataaacatggtggagcattctcggtaatttacctccacaatacaccatccgtctgctatctccaggtcagctatcggtatctctctctcttcctctctattcctactcccgtcggcttcgcttggaatctaatacctttcagccggaatcagacagttctcctggtttcaggcatcttgatgtctgtctctctttggcccaatgtaaatttcatcgtttttctgcgaacagtctttcttgaggacgggatctatataaaccgacctaaaaggatcagaccttaacatctccaggattttctatgtcatgcgagtaaaatctttgagaacgtgttcaaatgtttcggggaactcttgctaattgtatgtgcaatttctcacgccatcttttatactgtccaacaatcaaacatggtcgacccttctatagagaggaaccataccaaagtgtacattgttacggtgtcgagcgcaaagtagtacgccgggagagccaaaatttccacggaagccctattgaccgttccaaagatcctaagttatcagagtcaatattctcggatgttctgcttcggcagaaaatgccacctatgagggcttgcatgcgccagatccaagcatgcaagttgaactccagcatgaaaacaaagaagccgagtatggttatggggattgtgcaaacgaagaagatccagatttttggatgtgtcttccactgtagagtctgggttttttcgttctcgtcgagtgtgaagaaattcattccgaaaaatccctacaaatattttcagcatgtctcgtggtcaaattctagatataagggtcttactgagatgaaagttcccggcaggaatagaagcgttaaggcggacacggtatcggacaagactttgccttcattccgagtttgcttgagaatgcctttcgagatgttgctattggcaacagtgacgaagttggaggcctattgaactctgttaactgcctttactttaaagaagaagacgaagaagcacaaatggtagccattcttctttcgcaggaggcactaacacatttgatctcattatccatgcgacccacaaacgccttagcccggaaattcaaatttgtgatcatgttttgatacaataacagcgcttttgaaagttgtgttgttgctgcagaggaagggaaggttgactggatccacacaccatggtctcgtacgatggcaccaaggttattagaggtcgcatccatggactcagaaatatggatcacatgtcgcgataattcatgaagccgactgtatcgtttgacaaggaactcgaatgtttcatcgttatcgaatgatccagttttcataaacaggtcctgaccgcgaccctaggatttgttagatattcatctcgtatataacattgggaaatggcaataccttctctatatctcggaccggcttttggaagctccagagatcatcctcacactgctctatcacgatattgagtgcatacttgagcatgagaaagggttcgttgttccagtttctgaaatcggttttatgcagcagacgtcttagccggagggtaatatcatcatcaagatcgaagcaaagtagcacattggtctcgtcggtagatccatccgtcctcacttggccactgtctccagtagggttgataagtgatgaccgccatagggtacagaatgccatatagtgccaggcgtactcaaaatcaggcgcaggggtggagagagggtttgtattactagaattccctggattcaatgtcctttcagcgccctttcccttgactcgtttggaaagaaagcgcgaaaatgtccctttgtgagcgttcctgttagcaatttttggtggctatgataagctctacgtttttcttcttaccatagctcgtttctgagtcgttttgtaagaaattgacagtactgccgaacaagccatttgcgttccagcccagtctttcaaaaaagaagttaggaaggaagaacttttcagtcaactgcctgcataaatctgcactccctgccatcttcaatatcccttcttccacttttggcatgaagctgagatacataagcaagcgtagaatctaactgagatgtggttctcacataacatgaatacctggctttctcaagaactatatgatacctattagcaagttaccatgatacatttgtttttttccctctgactgacatctttttgcaaaagttcagtccggcttagttcctgaggctttggcagactttcgtctcccggtagggatggttgcggcgggctagcagttgtctcactgcctaaaggctctatccatcgccagtagctgatatttgttgagtgatttactgacatttctgaagaaagtcatggaatgttgttctcgaaatttggcatcgggagtggtggggaataaataaccacgctcccatttcagcccccacacattgcgttcgagggcggcacagcgcatgaagctatctgcgagttcgttggctggggggcgtaattctagtgcagattgcttctcgactcaacacccatcatctgaggggtcagtttgcggtcgcctggcggcagatccttaccctatacatttctttttttctaaattataattctgaagggtcggaccgcaaaagtttccgcgaaccagccccatcgccaaaatatatatttcaacccacatgcttgaaacattaactagacataattgttaaatagccaccatatttaaatgtaaaatttaatattctatatatcaccctttagacgcaatgttcaatcattgaagatagtgggtgtaattgcgcaaaggcggtatggagaaatttccgcggaaacctatgcggcagaactacccctctgagccaccccagccaggcaacaatggaggattcaaatgagccgtaacaaggaagagtgaactctgtatgaattgctttccaagctaaagcaagcttgtcaccatttcgctttcttaattaattacttacttattttggaaaatggccctggtatcacggactgctgaaaattttgttatcattagcgaaacgaaattcaggaggtaaacaagacaaatagcaactaacagactgcaaggtttctaattcagtatacgagttcggaatcataccagttcccaaggacgatctttgttcaaatcggagtgagctcggtggctgggaagcaggaatcatatggagtatcggtgtgagaatggcgaggggggggatttgagcgttgggttgcggacagggttgcaagagcaatcggctcacctacctttcgagagatgcaggtgaccatacgacatctcagctgaaggatcggcgcaccacttcttttttttggtctgagaacttggccattgaccttgattttctttttccaaggtttccaacaccttgtgaatttgaatttctcgaatcagctttgacataacatgcatgtttgcctgcagtatggtaatgtaactccgcacgcttggccacatttcaggggtgataactgagtacaatggttgaacacgaagcaatcttgttgatctttacacggagtactctgtggtatcgttacactggagcacgcaatttcagctgcagcctaatttacaccctctgagcctcaggagaaaggtctatcaatgttcaaggcctgtctccccatagagctctatagagctattggagatccagcagtcttctacaacaaatgcagataccactataacgccgggaagcatccaacgcatacggtatctcacctcgcagccccattcttaatttagacaatgagagaaaaattactgattggggtttattctgtcgccgccatcttatccgcactttaacagacaattgatttacgattcaacacagcggttttggcaccgggacagcttagggcgtaaatgggtagggcgtagagacgaccgtttcttaaattccaccgatggacgtctattacgactgatcgtgcagtcgacaaccagtgtgaagttacctggcgtcgagacatccttatcgatggcatccccgccatcctgaaagtcatgttctgggctttagggcctcgcagtaaaaaaaaaaacgtgacatcaagcaccccattacacggtggagctacgtccagcacttccttaattcgaaagaatcactcaagggcgcaagtggaaattcggttcaaatacccagtcggcgctgtcataattcttgttttggtttgtctcccatattattaacttattattgtatctttagtatgttgacacctgctaaatagctatttttttcttacggatcttgctggggagccaagatacaacggtcaatatgagccgtttagatatcattactggggctacacgcccatttcaagcaatccctatgaatgtccaacactgccagaaaaccctgatccagcgcatgagcaacgcaatcctacctctgaacgtcttgaaagaccgcaatttctgtgtttcctacgcgaaacatatagtagcaacaccttgaaggtcagtaactgggagaaaaaacatagagacacaaagacactacagtatatctttattgcgtacacaaccatacaattctcgcatgaccagaagcgcgatgacatggaagttctacattctattgcggagaaggcagctcgtcgtgcaggagttcaagtctattggcttgcatgcagctgtatgcctgaagacaaatacctggcggacgacgtatatcggatcagcgatgtagtacgtggcgcacattcgctcgtcaatgccgttggaccacctggtcaaggccatgaatcccgggtttacaccacgcgagagcttctcaaagaatggggtcggcgaatgtgggcatttcccgaggtccttctatcgccaaatacgcatccgatattgatttacacccacggcacatccgagggagaaccttggcagaaacccaaaagcaaatttccttcagaggcgtgggttgacgcctcaaactcacgccaactggtcggtcattacgaaggctccatcatgttgagtcctctagagcttgtgacaattgcattccagtgcctatcgactaggcccttgaaagaagaaagcgaagcagatatagcatatgtctttatgggacttctgagacgcaggcccagagtcaatcttagcgacagcgcctttcaatctttctcgcgtctttcaatcagtaatgatagcgataaattgcttgaaaggcttatatgtctgcttcccaaatcaaccaagcggaaatggtatgtcatcgacgacatatgggatcgcaatttatgggatgttgaccccttctgtccagtcgtcggtgtctgcctaggagattcggttgttctcagtggggcatttggagcctctattcgatggaaataattcaaatctgtgagcctgacccataggaacacagttggagggttaatcacaactttggcactgcgcgccgcacctgtgtggttaatcgtctcagcaggcttactgtctgctagtcaaactacagggtggaagatgatggtgggaatttacgcgccacttcggcatctaaagcattccaaacagccagctggatttttatgggcatcactatccttcttggcgctctttctcccttgatggtatactcgctttatgcaggcaaaacttggtctgctcaaccctggctcttcggattcgaaggctacctgcccacccacgagattgaagctcttgttattgtagtcaacatgaaccgtttggcttggactgggtacagcagtcaactatcgcgccactgtatggttgacggagagtgtattgggagaaaccctacggaagacccgaaagtcaagcgcatagttgattccagtgcttacgctacgtacgaggaaccaaaggttttcacgttggtcgacatgtttacaatgacggtaacactatttcaagccgtgaggccgccggtgtctctgctcctctgtggaagcgagggtggtatgcaccgcggtctactctgttcctgtgactggcccacataaagactcactcgggagagtgtcttacgagtcgacactcggatgcttgacaaaatggcccgagttggccgaattcgcattggactggagaaaagcctgcatgatacctccccaatgtatgcgtttgtgaacaatgatgcgaatccaacctgatgatttaatgtacgattatatgataggaacgtggtatatacaatatttaacgcgtgtcatacccatgtagaaatggtccttctccggaaatccagatggctctggtggtgagattcgagtttcttgatcgtgtagttgattctggtcacctcctaatcatattctgacgggtttcacgcatatccgcgagggagggcaacactaacctctgctagtatctatgtgtttctactttgaaaccctggataacccatataatatctgccttgctatttatgggaacaattgccattctatcactttctatttacctgtcggtgcgcttcgactggtcgctctgcttcctatgtgtgctttattgaccaaaaaaggtagaataaccgcaacaatttattttcatcatttataatcgtcgctttagctagtctcagcttcgttcatgcccaatataattagggcctgggtcatatgtatgaggccatggcatatgcaaacatgtactttcaaataattttggcagtatccgcgcctcacggctgccaggaaccaacgagtcttgtgggtggtatccattggctcaatagggttgttccttgtttcattaggtttgactattgtaggattatcgacacgaaagaacaggatgctataccatcccagtggctacgcttctagatgataggcattgcaagctggatgtcagatcgagcggcatatccggtaaaaatgaaagaggcagtgcgtcgggctgaaagcaaatgcgcagtagtcggtggggaccagaataaaagaagggggcggcgatgagtgcaagatataggggtaggaagaatgaaaaagtgagagagtgagagagtgggaggaagagcagcgaagacgggtcttttatgtcgggagcattgaagggaggttacgtgacagcgtattggggcgctaaacccagaaaggcaaaactaaccgcatatggtagttcacaggtccgccgtttacaagttggattcactgcgaaatcaccgactggttcttttgttggatgacattgctacaattatgtcaaacctgtctattgctttagttgttcctattattgctgttatgctggttctggttgcaatccaagattagctgttatgattgacaactccttaagcggccgcaacccaaaacggtcgttgaaattattgaaattgttgacgatgtcctttccagagacggagctattacaagatgatgatttttcaatcctcaaatctgctaccaactctcagtcctcggaacacctgccagttatgaagagaccacgcaagactaagcctcgacggtaaatgcaagattatagaactagcacatctcgattatatctctttgcgaagataaagaggctggattggttgaaaatgcacttcggcttcagggcttgtataagcttgcccaagcggtgtgctatcattctcatatcaaacgaggctcacaagacatgacttgatccgattgatgttgatattgaaacacgctggattgtccaacgaatgatttgggtccatgaacagacacctttcatcccgggagcaagggctcaaaattctgaaactggcgaacccatagggatgtggatgctgcgagaggactgaggtcaatacagacggggcccgtgcccgggaccactgtaccacagcatgcagttgctgcctcgatgctcacgggattgacggtgaagttctggagatggaagacgtggatgaagttgacttcacagatcttgatccccattctctacggctgctcaagggaacgggatggaatgaatagtaaagcgggtgcttctgctagaaatattaaagtggggctttgtcttatcttcgcaaaggtcggaggtgtagctagaataacatgattgccaaattagctttttcatgtgctttcttagttgaaagcaagagacaacaaacaagaatcgttcgttaacagggaaattccattaaactcgaagtaaaaccaccagaggacaccgaagtgccctcgttcccaagacaaatgccaatgccataccatctcgaacgcctatcgtcacataaagaaaaagaagagaaaacaaggtaagactctgatcatacaatcaaagaccactgtatgccaaagacattccatggccaattcttcatcaaaatcggcgcaaattcacaaacatcgatggaaataaaacacataggtagagaaaaaaaggcattggtctaaagaacctgttgttttaagactctccttcctcgccaaccacagcggcacggagctcccaaaccaaatcgtagcattcggctagcagattattgacacagccctgtccctctgggatatctggacccacgtagaatttcccgtcaactcgcatgttgtcaatcgagttgagctgtttttgttagctttatacgcaagcagcgtggacggttacataccttcatgctgtatgggtaaagttcgcgtgaatttgcaacacccccagactccttgacttcaatcaagcaccggcggagagtttgaagttggttgtagactgggagtaaagcttcagataccggctctgatgaaatcaaaagcgcatagatgtatgcataactgcgacgaatgaggtatagaagcgtctgatcatgttagccagaatccaccaaagaatgcccgaaaataaaatcttactcgctgcgcatgcaggtccgccggctgaccctcagcatcgatgaaatttccattaacccgtgcctcgtcaattcggtcgagctttcgctggtatacgaagagatcggtctcgcgcagcgaccaagcttgtgttacagacaaacgatccagttggttgcggatgtccaacaatcgttcgtattgatctcggaaccgctcatcaattttgccctctctgtatttgaatcagtcgatgtctgtcatcccgttggcagcctagaacataccgctcaagcacaatttcagtccatcgccaacacctgtgaatcaaagacttgacattttcctgcccggcaagaacatttccctcgtcgtcaacaaagttgccgtcctttgccgtcttttcaattttcttcagttgttctcgaagagaatttacctccgcagccgagaactagcaattaacagtgagttagtactaatcagatgggttatagaattgttcgatgccatacttttgaccgagtgttgacagctgatgtagaccgcagaattgagaccagtgtctcgtgtgtctgcaccaaggaaggagccaatacagcaagacccttctgcaacttcgccagtgactggtcacagtgttccagacggctttccaaaagcgtgaggagagcgggtgagtatgtgtttcggccacgctcgagagtttcccgtgtagactctagtgtcttggtgatcgagttcaagtccttcgagctataaaatccagcctcttcaaggtggtcgagtaaacgctgcaagatcgtcagtacccagcgcgcaaagctaacgagagccgaaggagattataggagtcaatacctggatagtagtcgccaaggagtatctggcaaaatgtcagtcactgtcacaagatggcggggtaataacattatcgctcacactgcgggagcttcgttgttcttcccaactgtcaagaacagtagggaaatcaactgaaagcaatcatccaagatataatccactatcattgaacgtcagtcacctccaagtcgagcgcaaggtctactaaactcacggcgattgtgtaccaagcggcgatcttgctctttacgaacggaattgagtttctcgacttctgcgatcacttcctcataaagcggtaggacatcgcgagactttacatatgaggacttatcccgcttgattaggagcagcgcgtcgcgggtccggagcaggttttcaaggatgggctgctcccgcggatccagcgggaccgggatggcgggggactccatggttagagaatgcgatattatcagtgggcacgttggaaaaagcaaggttgagaacaggttggataaaagaacaagtttctttcaaggtgaagacaagtacaactaccgggatgtgatgtcaattaatgaatggatcgattgatagggggatcatgcagatacgaaacgccccgcgcggtttactgggggattatgtcatctagatcattatgtcatctgggctcagctccgcttgcggcttagcgccaagtcacgaggaggagaataagctaaaccagattagtccaagccctaagcgagggctttttcccacacacggcgcgtttgcccggttcgggtgtctatcattggcgttctactctcttcttctttcccatccccaactctcttcaagacacccagtccggtcaacaccacccgtcgacatgtctaccgccgagctcgcctgctcctacgccgccctcatcttggccgatgacggtattgaggtctccgtacgtatccaaaattccttgattttggtgggatagtggaggcttgaagatcgcacttgaagctttatgtactgtgcgaatttgagcttcgggagagacacaacgagacgccgcgaaaccactaggatcaaacaacaatcatgcgaaaactgtgactgaccttgaatcatcatttaggccgacaagatccagactctcatcactgccgccaaggttcaggaggttgagcccatctgggcctccatcttcgcccgggtaaatacctgattcctttccacaacccgcgccaatattgaagcaactcgaaaatggccgcgcgcgacaatttaagatgcgataactaattcgatttccaacacaggccctcgagggtaaggacatcaaggatctcctgaccaacgtcggttccgctggccccgctgccgctgcccccgctggtggtgccgctgctgccgcccccgctgaggccaaggctgaggagaaggaggagggtaagttttgatatacacctctggttttgagctcagtactaatccccactacagagaaggaggagtccgatgaggacatgggcttcggtctcttcgactaagcgtcttatcttcatatcgaatttaaaaactcgtttccttttttctctattcctcaacctcttttcccactgccgcatagcggctccctcgacgattctttattgtactcgatactccacgaaccccgctacgacctagaacccggggaagaaaaaaagaaaattagcaaaagaattcaaacggacacggacattcaatggagactgggtgctcggtgtgcctccgcgtcatgatgtggccgaggtagactggatcggataccgctgcgattccgaaactattgttgcttccatgattttaggggaattgaagacagacgtttggcacacttgttggtttgtccatgatcaaagttttgctttggtctggcgagtagatgtatggttcgttttctcgccctccacatggatcagctcgattttcttggtcctcgtgttacgtctgtctgcgaccatgaaccaacaacgaaggccgtctgattcttatctggggtacttgttcgtaggccatgcgacgtagttctgtagcgctgatcgccggtgttggatatgtttcaggtgtttcgatctcgaggtagtctttcattgagcgcaccaagcccttgcggtcatcgctcagcagactagagtccacatcgacgatacaaagtacgaagtataacatgcctagactttgagaatatcactctatctgtgttcctccataatatcatagtcgttccaggattgcgctattgcgagtaacatacccttagtattgatgtacattgatttgacactagcaaccatacgtgaatatatcgcatcagtcaccagtccactattaaaacaaacgctatgctattccaaacttttttgatgtccagcatcaccaacgaacgcatgcaaatcatcttccatccaaagacttttgagcttgaaaccaaattttagatttgacggtatatagaggtcattgctctagacgaaacagtcaaatgtgagcaaatgtcaatatttaggagatcgccgagagatgagggtcttgaacagcgtagatccggaattggaagaagatgacggcatcctcaacaatagttcccagcgatccaataagccaaggaagattggtgaggaaatactctttctctgtagaatggcaaagaatctatatgaacaccattagcttatgtccagtttatagtacaacgtgtagtatcactcactcctgcaccgtaagtcaggtttcccataagagagagaataaagaacaagagcgacaaccctagatcaaagtcaataccggcctgatacgtgcatgtgaagacagtgaaaaaataccttcgcacgacttctcgctccagttcttatagatctgaggcaatctcgctctggaatcaaagtcaataccaactcatcagccataacggcaggagacactcaccccagatagcacacggcgctgaaataccccagcagcagccccccaacagcctcctcagaaccattgttattatccaaaggcgccggcgcccacatcccggtctgccaagccatggtccaaccagtcgcaccaatgaggaaaattccaacaacactagtaaaattcttgatccatgccttgcggccataatcattctcctcgacgatcttggccagggtatcctcgacctcactctcgcgccggccaccagtgtgataccggcgcagtgagcccgacgaccggcgccgcgacgcgatagattcgctgaatcgccgccccagcaacggggtagtcggctccacagagacggtggacgagcgtcggcggtggagaggctcgggacgcgagttgcgcactttatagtacaaacattgcgcgatgagcacgccgtctgccatacagaagtataccgcgatcgcaacgatcacgggcacaagcccggctagtaggccaccagcaaggtttgcgacatcgccgacgaaccaaacaaagaggaagaggagagatatagcctctgagttgccattgcgataattctcaattagttgaggtacctgaaacagtattgttagatatggattgtgtccactttggatttcgaggtgcgagtctggttgctaaacataccaaaaggaaaaaccagcaggtcatagagactgagcccaagagaccagatgcagcctcacgggctgttaaaggtatagggccttgttccatgctgtctatgctctgcgacaaatgtgtgttggagtgaaagaaaattgcgcgggagataaggccatgacacaatctactcctggccagagtcccgccgtgtccaggccttaagggtctaagcacatatagccctggcggaaatctcttgacatatgttaatatactaaagtatgtgtattctggaataatctctttaaactagaagcatgttaattgactgaatttattattgcgggatgtgcatcagccaagcatattgggggatttctacagccaatgatacacttcattatggtaatacatatgtgctacatagttatgtaccggataatatctggcactcgagacctttccctttccgttttagtgctcacctctcgtcgcttttttatcactaagtaaaactgagcgcgtccctgagtaccgatccacttactaatcattatctgagcaccctgatttgctcactgagcgctctgagtatacggctgcgcggcctaagtaagctacatcaataaaatgcgatacgctaatcctatcacatgcaaccctttccatttagatcgcctatcaaaataggactggcgcagtcaacatggccgttcatcctagcggtctcgaccctatctactgtgccacgcgatcaagtttaccggctatgctgggctccttgatctccttcttcttcgacaactattgatataacattctcccgtcggcttacgggaagtaaccctggaatgaatactataaggccgtccattcctcgtttgtccgccttgcttcgaaagaaaccgtttcccatgccttctctagggctacctttaccgcccggcatagtcgttaataaagagatctcgccggtatacgattctaagtacttctacgcagtaaagcctagagaggtactcgctgatcgttaccaaaccctggttaaggttggctaggcgtatctttaatagtatagctcgcgcgtgatttacaagggtagccttcaataatttctgtttaattcgaagctctctctatctctaacaaatatataggcatatcgaaaagccagagagcgtcgtggtactaagaatcgccaataataatacgagttccactggtcataagcgtagggttaaagagtccatttctaccgcagacccgtcataccgcggccgctcacttatccgaacatctttagactcttttgaagttaaaggttcagaagtttcttattcgtgtcttgtgtatacgcctatgagggagccattgtccatgtatcagcggcgcttcgacgatagaaagatgccactgcccctccttaaaacatacattcgtgctcttcttacggggcttgattatcttcataaagaatgcagattagcttatacgggtaagttcatccttggccttacgtcccgtcggtgatactaagcccgggcggcggtccaccccctccagaggtcatacaaaggtatcaatatatgcgagagtactcgtggcctggctgattgtcgggcacgtacactcatgttcttcatttttcgtgatgatctggttccgcctgaaagggtcttaccgaacactttactccgaggtggggaaaggagttccatacagtcttttgtatggtatgcctactccgtagtaaaggtacatatacatatgggcgatccctttcctcatttgcttggccccactgtatagtgttcgggtgctatggatatcaatccgagcttgtaacatcttacgctagtgcttgcaaggatttcgggtttccaaggtattgatgtacatggctattgcagaatacgtttgattcatagagtattgatcccttagactactatccatcttgaagctcccattactacttcagaacatgccatgaagtctcccttctcagtcctttttgccctcagccttgccctagggcagcctgcagcctatctcattaccccagacggcactcgctccccgggtagtaccgaagattacagttcttagatcgcgtacattaatatactacctgcgagttatgaagggatctatggtatcactgcggcggagtttgagaattgggtaagacgaacactggttgaactttgttgaaacattcactgaggcttctctgtcaaccccaatttataaccaagactggatcggactgtgaaatgctccctggtctgtactattgtgtgcagatcgattatatctacgatacaactactgtgggatttttttcagcgccagtaactgcaagctctaccgcgtcagtgtccctctctagcagccctgcgtctgtgactttgaattctacctcgagcaccatttcgtctttcttgacctcgctctcagccgcagctccgtctgtgacctcgacttcctctccctcgagtcaatgttcgaatttaaaatgtgatagtgaagtcaaggggcaagagaatatttgcagtcggtgcttaagcaatacaataaagtcgaaaaaaatagttaacgtgttgagttcagtggaatttccaacatagcccagggccatgctataaatgttactacaatctcattgttgtacataggatcatccaattattttctatgtacccagactaacacagagtgctaatcatgaagctgaattattctcctcgcataatcgcgagttcgtcctcgagcatgctgaccgcaaaatccccaagagagtccttgatagtgctgtctaacaatcgtcggcgagctgtttctgtgattgccgccatggcctctagataattcgtcaaaggtgcatagtccacaactacctcgctccaattgcctctatcgactccgtattgagaaaggaaaatacgaagagtttgcagaccctcgcgcgtgagccacccttcaagggccgccggatctctgagtggtgggcgtgagtgtgggatatcgaagtgctctgtatcctcgtcttcatcctcgaaaccaattggctcttcctcgtccgatgggacattgggagggcgggcgtcgtggttgatctggccaaggagatcctgcagccaattttcgccaccaccagcaggggctgcatataatggtgtaggttcagattgttgtttataggcttcggattcatagggagggagagggtcggaggatgatagtcggccagccacaaagtggtttggaagatgggttgtcactttggctatatcggacaagaccacatgacgagcgatgtccaaagtgatctctggtgggtcattgggctcctcgccagagatagaatctgcgacttccataatgagagaaatagcctcgggagtgttccaaaggtccttagcgcgggcgatgtagagttcggtaagcagctcatgagcgcctgtaggaggcatcttgccccatatttgcttggggacgtgctgaacatcaagttcctgtgctagcctgctgaatatccacgggtagcgggacatggcaagatgcagctgtcggcgacattcttggggcttattcaaccggaggtacgccattaccagggagcattgaatattggggaggttggcccagtcgcgactgaaccgtgtctgggtgcagagctgcacaaattgtgcatattctctacctcggagcgcgaggtggtcgatgagcaatctcatgcagtaaggatcgctgtcatccagactgagcaagagcttggcccattcataagcggttctccatgtgcccttcattgctaggttggtgatgtacctccacccaaccagccagagctctcggttctccgcatgcatgaaatcaagtctggcctcaccttccttgaggcgattggcaaacgaagagtgtactgagcgtccgatattgaatagggctctttccatcagatcagcagacacagcatgatcgccttggtgtttggcaatctctgacacttggagaagcgtagaaatatggtaagggttgtattggaggtgcccgatgagtctctgtgggtccatcgattcaacacagaggtcgaactgccgttgtacatcttggtaggccgtattgtgcactattcggtagagagtttccccggaaggaagcttctctacagtctccatgcctagccctccacttggagcacgaggccactcatctttaccctgcataagaacattgcgtcgcaatgtaactccagccagactttgacctcggctagctggactgtatcttcccgtcaaggcttgagcaaggtcgatcatttgtcgattgcgatcccgacgacggcccgttccattatccgttggttgatcaaagttttccagaacgacatttccaaacagtctgcgcatctcattcgtcgcattgagaaatttgggttcaatgccgagcaattcgctcgtagtctttgggaaagaggcctcgggattgtgtctggtagatagacctgcgccaaccgacgaatgcccacctgtcgataattctttcaaagcccgatcaatttcgtccaagtctccttcattcgattttgaaggcggggaattggccgaattagaggttttggctgccttcttcttcttctttttcttgttgctctttttgagttttatcggagttggttcaggctctggtgtgtgcgtgcgaggttcctcctcgatatcctcctcatcttcctcttcatcctcattttcagcgttcagcaaatcaaaggcattgaacttcggtttcgcggggcgcggggcttcgtcttcgcttgactcatcttgctgatcggattctcgctgctgttcttgttcacgcagcttctgcagttttcggattgctcgtgatgacatcctacacaccgaggcaaagcccttggaagtatgaaatagaagctgcctgcgaaagtaaagaaagcgagaaaagcgcgccgaaagaaacccgcggggaatgacgacagagactaatacggactagctccctttggataacatttacacgtgactttcatctgcggagacccagctccttgacaagcttgaaacctctctacatacattctcaaagccgttatttgccttgaaaaggcacataaatttatcagctgtcctattatcgctggaccaatgcgtcgggcgactgttcaggcctgccgtactgctcggcttgcaccagtatggaacattgccgctaaacggccgtgccctttgactttcaaccacctgcgaggtattcggccatatactggcagcagacgctcatcacacactccagtagcttctcaattatctatgcatcgacgcaaactctccctcgctgttatctcgaccgtcgttgcctctggggcatggtatacttatcagggcgacaccgttaaatcggcagcgacccagatccgggatttcgcatcgagtgccctcaactccgcctacgcagaaggaccggctgagaccacacggcgtgcattgctggtcagcggcgatcaattttacaccacgacgctctccaaagaccaacctctcgccaagcatacagacgattcagaccgccaagtcctcgagatgttgactcccgagcaagcgacccagaagcttcgtaagaacgaggagtcatatttggtcaatcggggcaagggtgttgttcgttacgatgttgttcaggttcccagcaactcccccattgaggacgaccatgcggagaagatagtggagatcccagcatccgtggctgctgtcagcaacggcgagccaagcagtgactggatgttctggggtgttttcgacggtcactcgtacgctagctcaaggttgaatacttatgatatagatactaactataagtcaggggctggaccacatctgcgaaattgcgcaatgtcttgatctcatatgtggcccgtgaattgaacacaacttacaaggctgcttctgctgatccatctctcctcgtgccaacatccgaggctatcgatgctgccatcaagaaaggcttcgtccgcctcgacaatgacatcgtacatgagagtttcaaggaagtcatgaaatctaaatcgcgacgggtcgccgccgagctccttgctcctgctctctcaggatcatgtgctcttctcagtttctatgactcccagtccaaagacctcagggttgctgttaccggagactctcgagcagttctgggccgtcgcggccctagcgggaaatggaccgctactgctctttccgaggaccagactggtggtaccccatctgaaatcaaacgtttgcgcgaggagcaccccggcgaaccatatgtcacgaagaatggccgaatcctgggccagctcgaacccagccgtgcattcggtgacgctttctataagtggagccgggatgtccaagatacgataaaagcgaagttctttgggcgcactcctcatccaatgctgaagacgcccccctatgtcactgccgagcctatcattactaccaccaaaatcgatccttccaagggcgactttgtcgtcatggctaccgatggtctgtgggagatgctgagcaatgaagaagttgtcggcctggttggtcaatgggttgagcagcaacaatctgctgctgcaagcacgggcagcaaggcttggttacagagctggttcaggttcgatagtcagaagacactgcccgtagaagctgcatccgacgcatcgagcgagggccaacggcgtcccatccgtcagcagcaatatgatatctctggcgcggctactcgatttgttgttgaggacaagaacgcagcaacgcatcttgtgcgaaatgcaatgggcggaaaggacaaggatatggtgtgtgcgttgctaacgctacccagtccttactctcgccgataccggtaaggatatctattcttttgaagtttattttttgagcatttggctaacatttcttagtgacgatgttactgtcgaggtcatcttctttggtcagggccctgattcgcgtactgtggaagtcaaccaggaagcgagtgcctcggaacagcctcccaagtcaaagctttaggcattattttgtcttgttttatttgtgacatttccaaagcattttgaagggtggctcttatacgtcttgcaatttcctagagaatacatagttttgtcaattttacgaattatttgcaatctctagattatttatataaagtcggctgtgtatttgatgccttggaccgcataagcccaatatgtatcctagtcctagctatattgtattattgtagctaattgttatttttctacctataacatagcgaaagaaaattatatgagattaccgaagtcgtacgtcggtaagaacagaggccgcatacgcggccgactattattatgagaagtaaaaggtattgtacatgctcgaaaacaggtgggcaaggagaattatgcacaaatgaacctcgaaaccagtcgacgaactatgtgcatcctagagcaggggcggtttatgaatgtcgacgcgcaaccccaagcggtgtcctgttgcgacccgaatgtggcctccatcttaataaaactctggaattcatttagatcagcgcgtgggtagctcgcgaccctgtaatggtgcatcgctgaacgaaccatcatcgattcaaggtaaagaacccatgtcattccaaatgattcgattctcgcaattgatatcagcgcaagtttttcaactggaaaggatcattatcgcccggcctctcgaaaacaatggcttgctttttgtatacgccaatctctaccggtgaaaacaccttattgtcaagtacccaggtttgcagcgtggcaaaattggtactggtgatccagtagagcataagtgcagttggtaactcttgaacaaagctcgcaaatccaacatagcatgtcaaaactatgacaaaggaccgcaaaccggtgaaagagagctgcttgtacatctcgttctttgggaggaacgaaatcgtcttccaaggcttgactttccatcccagcagaacgttccccaatatcgacgcagttagacaaaatggcagcacgcctgtggggtcaccggccagcaagtccgggaaccagagggcaccctcgttcgcaagagtgggctcgatggttaaatgcaaagattgggctgcggaggcagggtcttgcgactcgatgaacgacgatagccaggcaatgataccacgattgttaccgctcatcccacgcagactgtccataagcgcaataaagacaggtatctgcaggaaggcgattgctttgtgctttccggatactccccaacgcttatgaagctcagctgttcgtttccttatattgccatataattctttacccatttgagaacgtgttacatcgttgcgaggcacattggaaagctctctgttccttttgtctgcatatctcctcgcccaagcgcttataattggcgatattttcttttcgcgatggcgatggagtcgagtgtataacatgataggcaacccgacaaatgtacgaacaagtacagccgttaacggaatcgaggcagcccatggtagacatgaaacagaatggacgccgtgaataaatgcggtagagccgtcaagtgcaaggtcgacgatggatgaggttggtcttgttgggtggaagtgtcgaacttgcgagcgaggcaattgtatagctcgccgcattaggtgcagagcctgtgatgagcagagggcatgcatcactgctagcggggtgagagatgaaataaaaataaaataaaaaatggctaaaaaaaggtgaggctataagaattgcggaccggcaatcggatatttggagatcatcatgtgacacgtgattacttcattggcccgatcaagttgttgacagcaagagagggggagcattatctgacttgttctctagtttgacctcaaattctcttactatgtgtgatttctgatgaggtctctttaaatattgccttttcaccatggccctcttatcaaacgtcattctggccattctggtcctcaccgccacggctatcctgcttccgaagctaacaggcgttctcctcggtctagtgtttcggggagtgggctggctgatatggcgacgaacgcggtctcgccgtgagtatgtgatcgcgcgggcgcgatctgaagaggaggagttacgcgcctcacggccgaagggttcaacaacttcagtatcgcggaacggtggcgaagatgaggactgggagaaggtggatagctcaggcccaggcggggtacagactacaactggtagtgaaagcagtggtggtactggtgaggaaagcaaccagagtctagaggactgggatgggattattgggttcttccacccattctggtatggcattctctacacacgccaaaacacacaacgctgaccaggtgctacagcaatgccggcggaggtggcgaacgagttctatgggaagcaatacgtgcaacacagaaacgctggccgaaggcaatctgtgctatctacacgggtgaccatgaagtcaataaagccacgatgctggagaaggtggagaacaggttcaacattcacctacatgctccgaccgtggtgcttctatacttgacgacccgcaagtatgttgtcagtagctcatatccttacatgacgctgcttggacaatcgctggggtcactggttgttgcctacgatgcctttacgctgcttgtaccggatgtttttgttgacaccatgggctatgcattcacactcgctctgtgcaaatggcttttcccgacagtgcctgttggcgcttacgttcattaccctaccatatcaaccgacatgctcgcctctctcgacgacaagagcggggtgcaagggatcaactccggtgcagggaaagggtggaaagggaaagtcaagcgtcgatactgggagatatttgccaagctatatggctgggtcggtcgacagatcgatgtagttatgtgcaactcatcctggacggcagcacacattcgcaagctctggggcaccggcaagaaaaccagcaatagcagcggcgatgggacagcgtcatcgccggcggtggtgttccccccaacagcagtcaccgaactggaatcaaatatcgccgttgacgcggagagcgagaaaactcgccagcccgttctactttacatcgcccaattccggccagagaagaatcacccactagtattgcgctcctttgcgcgattcttacaggaacgaacaaacaacccagcatatgaaggccaaccccctccacatcttgtgctcattgggtcggtgcgccattccagccctgatgaaacccacatctacaacctgcgccttctagcgcatgaacttcgcatccgcgaccatactacattcttgtgcgacgccagctggcctgtcatgctgtcacatcttcgcaccgcctcagttggtgtcaatgccatgtggaacgagcatttcggtatttgtgtcgtcgagtaccaagccgccggtctcatctgcgtgacacacgactcgggcggtccacgtgaagacattgtcgttgatttgggtgatggtgcaactggattccgagctgaaacagaagagcagtttgctgcttctttcgaggccgcccttgctcttccggaggcagagaaacttgccatgcggcagcgggcccgtcgctcagctcaacggtttaccgaagaagagttctcccgcaagtggctggatcaagtagaaaagcttgttaaggcatcgaaagtttagctttgtgatatccccctcgaaaatagacgaatggcatttccatttactttagtagttcgctgaaacaagaagtcaattctatgacaacaacccttaaggactgtacttaattcataataatcgtaaaatagaaatagaagatgcggtcaagtctaagactcgtgtataaaaacagacatcgcgactagagaatctcaagtcttctaaccagaaacagataatgtctgcaatacaactgatgacaatgcgaacaccctgaacttgcccctttaatcgctatcactggccgcaccatccgagtcagtcccattcccggtattttgaataccttcagccatgatatactcggtttgctgaaggaccttcttaatctcgttattgttgaagaccagctgagcaggtttctgaccatgcttattccgcactcgagggtcacagccagcctcacacatcatcttgatcatagcctcgccgagttctgcgtctttatcgttggcgtaccgcactgcgatgtgcaacggcgtgtcattgtccagccgggtcaacgggtcgcattcgaagtattggatgtcaaatagtgcgtccatggtatcatctgaccaaaaaaaggagttagcttgcatgaaagatatgaagtgggaaggtaaacacgtacagctgccgtattgggcacagatgtgcaatgcgtggtttcccatagagtctgtcaactcgttgaagaattgtgccacttgctcatttgtcttgtcttccatatcgttcagcacttgctcaattaggtggggttggtcccggcggcaggcctccacgaccagctcgcggggtgatgcgccctaaatcatagcggcattagcgttgacagtgagcaaagattacgtagtattcacctcgtcagccatttttgtatacgggtccacagagtccggaatacccgagagtgaagtcggtagtacagaaattggtgctcagctgttatggggcgcgtggagctagttgtaacaataatccggcgttttgtatgggtatattgctgaccagaatgaatcttccacggggaaacgaagtggaatatgtatgtacaagctggattgccggttaaaaaagcattcaaattcctggtaaatactacaggttgtcggagttgttccccattccacacgcgggccgccccggatatataatcgtccgaatccggtccggatttagccgcgcgcctatatctctcattatcgacggcgatatctgcacctgacgggaactacattgtatagctgctgagaacctacctttctcctggtctagctgtctggctctttcttagccttacccaccgtatccgccagatcaccaagatgctcgtctgtatgtgctatctcctagttcacgctgtccagcgacagccagaacagaaactgattcctctccctagtctgtcccaactgcagcaatgcgctcactatttctaaagcggaatcgagcacaagattcccggcgggtgtgaaccgctttgaatgccgcgtctgcccctacgaggcaccgctggagaagaactatttcgagaagaaagacatgaaacaaaaggaagtggacgacgtatttggtggcaaggaagagtttgccaatgctgacagtgttggcagtaagttatctctgctatcttctctcagaagtgacatgtccgtcgagtatacagggctgacatactcttttttttccttatagctcaatgccccgctgaaagctgcaacggggaacgtgcgtacttcttccaactgcagattcgcagtgcagatgaaccgatgactacattcttgaaggtatgtctccctccttacatccaacgtgaggtacccgtgtctgacagctccagtgcacgtcgtgtggtgctcggtggagagaaaattagagttgggcgacaaggctgggaacaagtcacatctttcatttttggattttactacagcgaggtgcaactggcgcatttaccaggtgtttattggggcatatatgactcaaaactatcatgttgatacaaaagatacccaaattgatcaacactgaacattactattttgcgatcagcggactcaaaatttaactttttatgcatttttattttgtaccataacttattgtagctttggctttttctgtgcttcgccactataaaaatattaccgacttagtacggatgtagagcccgacattggttctgcctgggatttgctacagagaaatcggatcaccagacgccaaaaaacaaataaaattctatgcatgacattgttggtgggattatttggcggtgagcatgttgcccctcacctgcggggttctgaaaacacaaagagagaaaaaaagagaaaagaatggaacgagtcatccaatatcgccacaggaattcgtacggtgccagagaaagcgggaaataggtacagtaaacaatgcaacctagaaggttctcacccaaccactctgcgttgctgcccagttcaggcgtttagagccacagagtgggctgggacggagccgaagaaaaaaaaaagttttcacaccgagtggagtgccgtggcaggagaaaaccagagaaagggagggtgtttcaagcgcagggtagacagtacatggttcagtatgggagagtccgtattagggcaggtacatgtacctcaacccaccaacccactttgcaaaatctgcgtacacgggtaagggctagaaccaatcacaagccctaaccaaaagagggcttggccccacctgctgactcgcctcgctcgcttgcccctccatataaggatttcccctcctcccctctcccacagatttttcttcttcctctcgtctgctacagtgagtttttcctgcccccctactgcttttaagccgtctcgctccctcttccaactactcttactgattacttttgctcagtacctctacgcgttctgccgtagtctctgagcaagtttttccacagattttttctagtatcttacaaagaactacaaaaagttccaaccgtcatcatggggtatgtgaccatcactcactcgtttcattctcatcagaacagacactgactcagtcccaacagtaaggaagagcgcaaccacatcaacattgtcgttatcggccacgtcgattccggcaagtctaccaccactggtcacatgatctacaagtgtggtggtattgaccagcgtaccatcgagaagttcgagaaggaggctgctgagctcggaaagggttccttcaagtacgcctgggttcttgacaaactcaaggctgagcgtgagcgtggtatcaccatcgatatcgctctctggaagttccagaccgccaagtacgaggtcaccgtcatcggtaagagacactgtcccatccattcagtcagttgcacacattctaatacattcttacagatgcccccggtcaccgtgatttcatcaagaacatgatcactggtacctcccaggccgattgcgctattctcatcatcgcctccggcactggtgagttcgaggctggtatctccaaggatggccagacccgtgagcacgctctgctcgctttcaccctcggtgtcaagcagctcatcgttgccctcaacaagatggacacctgcaagtggtccgaggagcgttacaacgagattgtcaaggagacctccaacttcatcaagaaggtcggctacaaccccaagtccgttcccttcgtccccatctccggcttcaacggcgacaacatgctcgagccctccaccaactgcccctggtacaagggttgggagaaggagaccaaggctggcaagtccaccggaaagaccctcatcgaggccatcgatgccatcgagaaccccgtccgtccctccaacaagcccctccgtcttcccctccaggatgtgtacaagatctccggtattggcacagttcccgtcggtcgtgtcgagactggtatcatcactcccggcatgatcgtcaccttcgcccccgccaacgtcaccactgaagtcaagtccgttgagatgcaccaccagcagctcaagcagggtaaccccggtgacaacgttggtttcaacgtcaagaacgtctccgtcaaggaggttcgccgtggtaacgtcgcttccgactccaagaacgaccccgctgccgcctgtgactccttcaacgctcaggtcattgtcctgaaccaccccggtcaggtcggcgctggatacgccccagtcctcgattgccacactgcccacattgcttgcaagttcgctgagctcctcgagaagatcgatcgccgtaccggtaaggccaccgagacctcccccaagttcatcaagtccggtgatgccgctatcgtcaagatggttccctccaagcccatgtgtgttgaggccttcaccgactacccccctctcggtcgtttcgccgtccgtgacatgcgccagaccgttgccgtcggtgtcatcaagtccgtcgagaagaacgccggtggtgctggcaaggtcaccaaggccgctgccaaggctggcaagaaataaattattctcggatgatgctcattatgccgtgatgattttttcttttcaaaaacaattactggatcgaggtagatttgctgtgtagtagaaatgactaccacatttttatgacaaattcttttccttgtagacttgtaatattattaaagtagctgccgttagacgttgtatatttttgtctcagcctatagatcgcgggatggcctgaagctaatcttggcgtgacgcctgattgacagtacacctatagaccatgtaccttctgtcaagactgtataatatttgcttcaatccctctctttctttctgctataccgataacattaactatcagacttgaacttcttattccaatcttttgtaacccgattgaatgagagggcatcacgatcctatgatcctcaaatcggcttcatatcaagcgatatcaagtaaggaatagcaccatgttcaatctggggcccaaatacatatcagttccatcctagttcgatgtaaaagcccgttctagacttatttctgtaggatcgaccccgatcgatcgccacgagacatggaaacatatatattttgtcatttgtgtacatctcatagttcatgtgtatgcgtatatagtctaacggagagaagctcctaccaatgaataccgatttatatcatgatcattaaagtgttaccatccaaaatctgtaaatcatactataatcatatagccaagttctccctcgatgagtacatgatgctctctagtatcaggtgtgaagatgaagaatatgctcgaagaaagaatttgcctacacatagtaatgaccttcaaaaattaaaaacacaaatattcttgggtatcaagttgcagatacctacatgtagtatgtatccaatgttatcacggcgtgccaatcgtagacatatcaatcactcttcctcatactcttcctcatcagaatcctcctcttcctgagcaggagcacgcctcgaagaccgtctaggcccagagcttcgcggcgtctcacgttcctccccgtccccgttcacatcgctcgcatcatccgccccattagcttgtatggtcgccggctcaatcccaagactcctcccgagcttcccctcaaagtcttccaggtcctccctctggaattcagtcaagttctcgtggggacccctgtttttcccatacacagttcgcacaagacccgccacaccactagtcccaacctcaactttaccccgaggaccaagaatatactcaatcacctcctcgccgccatccatctcccgcgtcttgataatgtatccctccttgcatagccgctgcagtagtttatccgtgcggtcgaccggcgtagcaatctcggcgttagtgcgcgtcaggtaccggtcaagtttctgctcagccagcgaaccgccgttcagcagaatcaccgcaataatgaaactgtacaggccggtgtatgtgctttcggtgtagagggagggtgccttggtcgggatgaggatatcgggggaacgatatgcgagcggcagtgtgctagtaacgatccaggacttgttacccgaagaaggcttttcaattttctgcgcggctgtagtacaggaatgccatgccatgtcagtagtgaatactcagaaatagcatgagtctgcaacaaagaaaagcaagacatggaatccaactcaccccgtcgctggctgatggtgaccttctctcgcgccggtaactcgctcatctccataccaaagcgctgtctcatttcccgctgcgcctggtcgaaaactagcttgaattgtcgcgagccgtgctcgcccagcaccttggcgctgatatcgttgcgccggatcgggagccgcgaatactcgctggctagggcgagccgcaccaacttcttgaccattgcgtcggtgctggtcggtgcgctcggttcgtcatcgtcgctggatgctgcgggcgatgaggcgggttcttcggtttgtcttctgcgacgagcgcttggggttacctcggtctcgggtgcttcgttggtctagggaaggcggttagttggtggataaaccaagggttgtgtttgcatacgcgtcttttgcgattcgatgacattttgattatgtaggtgtgataaattgcaggtgggtttggagagacgcgacgcgatagactgattttaccccattggggttggtctgtgcgtagcccttatcgatggttctttgtttcagcagatgggcttcgatgtcagtttctttattttaggttccttcgaggattgtatttggtaatttactgaagaaagacatcattttcgacgtctacgtatatggagagttatatgacgaaatccaatgaattagcgtcgaggtataattacgtcgatactgggaacgtgaactaaatacaacgtgggcaaggcaacacagagcagcgatgaggtattatgttctctaaaagaaaaggaaaaaaaaaaaacaaacaaagaaaacgaacgctccaaaggtcaaagagatctaaaatcagtggttgtacttttcattgacaacctccttcgtctcctccttcttactctggaggaaagtgctaacccaagccagggattcctgcgacagaaccaagctggtagtaacaaccgccttgcccgaagcaaagacaccatcaccaccacactttttgtactccgagccatacacatcgaagacatggtgcttgacatcgccggcgacgcggacaggcagcgaggcactgttgtagatggaaccgcgcagcttctgggtgtcctccttgaagatcgggaagcgggtatcgatcttggtcagacccttgtcaccgagggagtcggcgcgggctatgtagggagcgacatagctgtatggggtggagaagtagggtagaacgggtttggcgagacgggtgtagccctggtcagcgaattcgagggacttggctccgtagggattgcccttgtagtaggagatagagtcggagatgatgggataagaagtcagatgctagattggagatgttaggatcattctcgttaggctgtagtggggtacatacgtcaaggaactgagagtagtgcttctcgccgttgacgaccggttcacccatttttacttctgcgtggggcataaagattgtaagttgagaaggatatagtataagaatacagaagagaagagagagggagagagggagaggaataaattgggttgtatagaggaaaaaaagggttttcacatgtgattgcgctgtcattatgcaatgggtcctaccgcaatcgcatcatttgccatacatcgtattctcgggttatttcagtcctctacttgggattattcttcttctttgctatgttcttttgctatattcttttttccatcttttttacgaagacaagggttcaatggccgattctaagtgatcccacgccaatccattgactttggacatgcactgaaaccgtccgagcaattgcatggctaattatagttgacgtatcccaaatatacttgtttcgattgccaaaatcctgaaaaatcccaatcgatggattcttgataaggtgctttcgcatgtgattgcgggtctgtgaaaggtggttccacttgggtgtctatcaatgatctgttctatctctcttccacggtcaattcctaccttcccaggtgcttcccagggtttgatattccccagaatttatccattgaactcaaatgaggggagacctcgcaagataaaccttgttttcgtccgttccaccgtttttcgttggacgagactgcttatctgcataagaaaaccgcctagacggtgacagatggccgcagatcggggctagtttgccagcatatggctgatgcttcggcttctaagttatatgagtctagcccacctgcacgtacattggtgatgctagtcatgtccccacctattggcctgaccgtcggcccctcgaaccgcttctactctcgggaatacgtaacagcctccggtccaaatgtactccgtagggggagtaagattgcgcaaggtcctagccggattggagatcgttctgccgaccccgggcatgggacgggcgaagtgattcgcagggtcatccgaatctcggcgcttgatgtgactctatggaacggttgcgttcgataggcatacactactatggccatactatatttattggtccaggcggtttatctgagcgatagaaggtaccttggcacttcgtacatattacctggtgttcccaatgcggctaacggaatgcggaatgttatgtattcggtacgactatcagggtaagccgagaaggtggccaggctttccattgtggtcggcacatgaaaaactgatgtcgacacagatagttatgccatggacatcgaaattctaagccggagaggcgatgttttttttttgccccccctccttttttttcttcttttcttctttctcttttgctcgggactacgccgatcgactagcaacccactcgattacgattaagctactgtgcagatccctgtataccgtgggtcttgaccagcaacggttgtcttgacatctacaaagtacaaactctgccctttctgttcacgtaccctttacccagaataccgcccaaaaaaatacatcttatcattgcttttggagcctttggaatattgtgtagtcgaaaatccccatttaaactgtggcaaagcacgccactcccctacttctcatgtacaattgggtctaaaatggagtggcgattggcatgaagatgcttacatatggacatctagcgtcgcggaggcccgtgatccgttgttagcgaatgtatcaatttcacatgtcaaactgaggcgtcgtttagcgttggcgctctcgatgtcaaggattcaattgtgttgccttgtaaatcaattggtcgactgaggtgattatcacatgaaatcaggcgaacacggcttattttttcaggcgttttatctgtcaaatattctcgaagcgctttgcccttggcttggcagttgttgttgcattactacgtcaacatgtgtgccaagggaatcagctgtcggacatgatgccgcgcatgaggggatgtattttgtggtcgctttgttgtgtacggactagactccacctgaaaggaactccgggtttcacatattcttggtatcgtatgatttactatgttgtactatgttggagtcaatcggctattgcacccgacagctatgcactctcatgcaggctctcattctatattcccaccctcatgatagtatcagtgtatatcagtatttactttggtcaacctttactccttgaaatgtatggtatttttgagaaatactagcgtagcagactgtatgtgaattatattcgtggtgggggaaaatatcagaaatatatatgtagtactccatatactaggccggaaaaaaaaggagacctggtcaatacctaccaggtactccatactatgttaaagaaactgatcatctcgcatgcgttgcggcaagtccttactagctgaggtagagcgtgatcggctgcgactaggtgaagggatactatctcgctgcgctttagagaggcatctgcaatctaatggagcgggatcattgcgcgcacgattccagcgaagatacgaaacatcatcacgactgacaactccagggtggtcatttgatagagacatattccaaggatggacagaatcctccccggcaggagtgtgcaagggtgctttaagaacaacctcaaagggaccaacggcgagcgagtcttgctggagaatcaacttccaaagatgccaaaagctggtatcaatcatgtgttggcccgtatttgcactgagccgccaataacacgggaatttgttagtcttgattctcacctctgcaacctggaagggcgggagcggaacctcgtggaggaatctctcaggtagatcggctatgcccatgaactcgctctggatctgtatccactgctcctggtattgttcttcgaaaaactccgtccactgtgggtttacgccgctgtcagctaaccccgcggacatctcccagatgaaatattcggcgttgacccacttgtcaatactgaacgatgttttcagaagggaagtagtgtcgcggcacacgttacagtgcatcaggatatgaggcgtggcccgcacggctaccatgggcatgttgtagtgtcgatggacctcgttgtccaaccatttctccctagcgtgctcgcggatgggtttgagaggaatggccatggttagaactagatgactggcgatctattgacttgcagcttggtatggaccctactaggtgttcgagtacttgattgaaataagagatcagtggtctatataaatactatgtctggattgaatgaaatatcctattctgggcccgtggagactaagataaaagaagacaatgaagataaaagaatgcgtttctcttattcgaagattgaaccgaaaatatcgttcaaagaccattgtccccttgtttactgtttactagagatcaaaatggttcagttgttcactggaacttggaatcaaagcgactctttgtttggaatagatgaaaatactcgagcgctgtcaaaactgaaatgccagtgggtaccagcacaagcatgcatgctatatgctagaaataagttcaagattgaatcctgctagtgttgaatactcaagcgctgatgcccatatcgctgaggtatgatatgtcttggcgggggtggggttcacatgtggtatgcatatagactgtggaggaagacaatctataattgtatccgcgagcatggacatgaggacctagacctttgggggcttcctcgacatcctcgtcgtgatcgggaatctagagtcttctttggaactagacgagaggcctatgtaagtaattgcttttcgaaaactacgattgcacgttacggatagacatggttacatcgatcgtagcaatgaaaccatgagattgaatgccctgagacaaaccacatagctacagggtcatccaggcgtgggaatgatctgtgttaggaggacagaccaaaatccttcccggcctatgcgaaagaggaagatgtcgaccagttttcaggtaatagacaacattgattttgaaataattgttcattttccatttcattcagacggacaccaggtatggaagtggcgcccccgttaaaactggagttcatcgatacattcacgaatctgtttccagctatggcgtatgttttcccatcccatgctcgcagggaccgaatgttctcgatggcttttcgacctcgccttcacctagaccagtgcgctcaaaacgacaaaacgcccaaggaaaccgtttagaaacctgtttcggagaattagtgcaagttccaatatgcatatatgtatatcccgggccaaacatacgcagggcagtgaagaaccaacggttctttccgctggtgtaacggtcctcaagagccttcttgatggtcttcttggcgtcctcgcgctgggagacctccttgaaggtgtcgttggtgatggtacccttaagaccctcaagctcgagagtgtaacgggtgggcatcaagtggttgtagttgatgaccttgatgaaaggcttgatgcggctgcggcggtcgacaagcttcttgcccataccacgggtcaccttgagggggtaacgctcgataccggcaacaatggcgtaggagaaggggtgcgacttggagccagcatcaacgggctggacaatgacgacctataaactcgaacaaaaatgcctgattagcactccgaattttttttcttgtcgcgcagttcctccatagtgcattgtgctctttcaaatctcgagtctttcgcttgcaggtcgttcgcctctttctattctcgtgctcaatttcggggaggatcaggatcttgtcgtaccttcttaccggcgtagcggccacgggtgatgatggccacacggcccactttcatgactgtaacatatctgtcagcatataaatcgtaaggggaatcgaatggtgaagacgtacacttcattttgtgaaggtcccgggggcggcgaggatggctggttgtcgagatacggaacggtcaagatcaaagtattcgtttttgcggatgtgaggtagagggtttcagggcacagtagcgatttgtgtgttgtggattgattggttgacttaccgacagatggcgactagcctgtttggggatagtttccccattgagccccggggccggaggagatgatgacataatctgcatgttgtgcccagccttgacggtgtagggcaggtgcggcccagtcctgctcaccgcctgccttgattcccgctgactcaggttgtgtttacatgacgatcgcagttgccccggttgctagggccgtgagtgatgtatacaagactgcgtagctcctctttctcctcatccccacttgctttccacttatcaagctgatctcccggtaattttctctcctccaccgagctctgagattgttagctttgttttgttcttccagcgtttcctccttgacgaccttgtttttactttgaacgcattctacacataccctacatacattccatccatattgtcaatacctctctgagacatctggataatccactcacgaagacatcatggtgtccccagagaaggataccccccgtgaccgggaattggtccggcattcactgacatactccgagtccaaagttccaatgtaggtttcgcaactaacgccttctgattcttgtttcgcgaaacccatgggtgatttcaaacaaatgctaaaacgcggtctacgcaggtgggacagttcggatcccgagcgtgcgcctccaccgctaccaatgaatcctcgttcgatgagtccgatgagccctgcgacgaggtccaatgtttctcccaacattcaagcagtggccgcaaaatttacagagagacctagcgataatgcaccgagctcctacacaacaaatcctatgccactcaagtcttcctcgccagagaggtcgttggtcaaaggccagcacaagcgcatgcagtcactacagcctgaagatacccgacaagatgcgcgcagcgactttctgaattaccttgacaacagatccccagagcgtcctcttcgtgcgacgattattgatgggaccaagccgcgcgaccctaccaagtcaaccagttcgccagtgctccgtcaagatgtggaccgcgagatgaaatactccgtttcgagtcggtacttatccaagccaatattgggagagagtactccaacctcagctacaatgttggctctgcaaaatatgcagctacctctagaacccgaccctccatcaccttccaaaccgccaaaaatgatcgctgggccatttgagccacaagcttattccacaaagaatgcaagcatggacaccctctcaaatcaaatccacagtctcacggacattgcaagcagtctgcagcgtgagatgatgaatttgagccgacgcagcaaagacaatgccaccgacctggttagcctcaaggcggcaaccaacgcacgcgatgaagacattcgcaagagtctgaaggatctgtcctctcatcttacaaacaagtacctggacgctgaggctacaaggtttgaattcagcaatcttttcaagggtggtgatgggcctaacgccaagggttcggatagtccagtttcgaagaggagctactccgtgcctcgcatgcctagccctaatccattcgcatttgatcgggagtcttgcgtctcacctgctccgatttccgacggttccgcagcccttgctttgctcgaaaaggtattgcgcgagatggcgactaaggaaggtgaggaaaggatcttagaggtcgttgaagaaatcaaatctcgaccagcaactagcgcttcggataaagattccgataacaaggtcactgctatgctcgaggagatcctcaatctcgtcaaagaggatcctgcaagcaaagccctcgtgcgatcttaccgtaggggcgccaataccgataatatccaatctgggaatgcctcctccgagccgagacgatctgggtcgatgggatccgtgcaccctgaaactgtacgtgcactagacctttctaactctgagaaggagggcagctcttcacccaataatccggaagaagttctggcaattcttaggagtgtcaagaatagcgtcatcgaaggaggtggaatgaccaacggcgtgaagtcgttggtacgtgagctacgaggtgaggttctgggcatgggtcgagaacttgctcgccgattagacgagatcgagagttcccgttccaacgatgagtccgaggagcagcctagagccgctggcccagaggaagtttccgccattgtcaaccgcagcctggacgacctcaaagagcagctggctgctactatcaatgagagtcggcagcagtcgtccgacttgtccgaattcagatcaaccatgaacagtgccgcaatctactctgttgtgaaaaaagcactcgatgaatttgaactacctcaaccccaagcccattcgcgaggtgctggaatggacagagaagatatcctcgagactgtccgtgaagcctgggagacctacaagcccgaaatcgagttcaacaactttggcttggaacgagacgagatcctcacatgccttgaagaaggtctcaagtcttaccagccccaaaatgaacagacggtcacctacgatcagattctcgcagccgttgaggacggcatgcagaagttcattcctccacaaatcgagcatcagccaagcatctctcgggatgagatcatcttgaccatccgcgaatgcttggagaagcagcccgagtctgcctctagatctcttgacgaggaacacgtcggcgatcttcactcgatgcgcgacgagattctcgatgctgtttccaaagctatggcgagccataccgaaggttcgaggtctttggacgaggaacatgtcaatcatctctattcgatccgcgacgagattctcgatgcggtcactgggacaatggcaacgaacaacatgcagcccaagtctttggacgaggaccatgtcaatcacctccactctgttcgcgatgagatcattgaagccattactgaggtagtgacaagccatgccgcaggtcccaaatctgtggacgacgatcacgtcagtcatctgacttctatccgtgacgaaatacttcaagcagtcgtcggggcaatggctacgaatagcacaggctccaaggagttggacgaaggtcatgtccatcacatgtactccattcgggatgagattctgcaagcaattaatggaatgatggacatcagcagcacagggcctaagacgttggatgaggaccatgtcaatcacctctactccatccgcgatgatatcattgaagctgtcactggggcaatgggtaaccacagcacctccaggcctttggatgaagacaatgtcagtcaactaaattctatccgggacgaaattctcagcgcattggccggctctatgacacaaagcacactgagcaaggactcatacgactctggccttggccgcgacgagattgtccatgccgtttctgatggcctcgaagcccatttcactgcggctcgagagatggatgagccacgcatttcccgccatgatgttatgaatgcggtcaatgaagccttcgatgctcaacaatcagctcttgctactgctcacacgaacatctctcgtgatgaaattttgaatgccattgccgagggcattgaaagttcaatgaacgctcagaaatcagcactcagtacgccctctcgtgaagagattttcagcgccatcgtggatgccatcgaacactcacgttcttccctcaccaacgacggggagcctagtatttctcgagacgagatcctgggtgccatcttggaaggcatggagcacttgtcaaaagaaccgaatatctccagggatgagatcatgaacgccattgctgatggcattcagaactcgagtaactctgtttcacgtgctcttacactgcctaagcaagacagtgacgatcagcagtccactctttcccgggaggaaattattaatgcgattctcgaaggtattgagcagtcccaggcttcgctcggcgtgaatggtcagcctagcgtctccaaggaggaaattatgagtgctatcgttgagggtattgaagcctcggcaagcagccagcagtcagcgctcagcaccaacgtccaagagccctccatctcacgcgaggaaattttggctgccatttcagaaggcattgacaatggcaattccatcacccgggagattgagctcaaccaggacgacctcatggaggcaatcacctccggtctcaacgaggctatcagtaccgcaaataccaacgttggggaggagatgacagaacgcctccaatctttattcgaaggcatgaaagaggaattcaagcaatactcggccgccggtggaagagataccgagcaagtcctcgacgccatcaaggatggcctcgatatcgttcgcaaggagatcgaaacttacgtggttactgcggccgatctatccggcaaggaagaagtaattgacacggtgaaagaggggttccgacttctccacgctgatatggaaaagaccattacagattcaacacttatgaatgccccgcgaggcattccggatacacctgagcttctggatgccatggaaaaagagttcgagcacctacggggaaccatcaccactctactcctacgcaataatgccactgaagacaaagatgagatcttggacgctattcgagaggcagctgatcgccacaagaatgaccccggcgatgatgttgtcaatacgatcaaacatgaattcgagagtctccgtgagcgcatggagatgagtgtggttcgtgccgaacctggtgctgagaaagacgagatcatatccgcactccgtgaacaattcgacaccctgcgcgaggagacgtcgcgtacagacggcaacgaaaccacgatgtcctcgacaagtgagctcctcgaggtattcggagatagtgttgactcaatccgtaacgacctgaagaaaatattggagaagccaactgagttcgacagctccgagattctcgataccatcaaacatggtctcgcagatctgaagcttgaaatggatactctccgtgattccaacaaagaactggatgatgccagtaccgcccgcggcggtgaactcatcctggcaaacgagcccagcattggacctgacattgacggtctgaaagtgcttatcaccgagcttcatgacaagatcgaggccattgaaactactcctcatgccgcagaagcttccgaggatactctcaagcgctcacaccttgatgaagtccttcttgcgattaacgaagttcagcttgccgtgggtgagatgagtactcaaaaaagcgacgagaacaatcagacggctcgaaagaaggacattgagattctcgagcagttactcttgagtgcgaagacccagatcgatgaacttgttttcccttcaccggaccaggtcgctactcctgagcacattggagccctggagaccatgatccgagaggcaaaagaatcgattgcccagttttctagtcgcgtcgaagccgagactcccacaaagtctgaaatcggcattttggagggtctcatcaaagatgtctgggttatcctagatgagatgaagagcaaaactaaagatggagattccgataaattacttaaaactgatatcgaaacggtggaagcaatgatcttcgaggtcaagactcaaatcgaggagcttaagcttcctgatgtgaatactcttccaaccaagacggagatccaggagctctcgacacttgtctgcgatttccgagagacgatggaggccaataacgaattgacagcccaagggttcgatgctcgcaaggttgagcacggtggtcttgccgagaaaatcgatgaagccaagtttgtcgtcagcgagctcggggacgaactcaaaagcaagcttgatggcagcaccgaaggcctgaccgagcttaaacagctcctcgaaggactagccatcaccgcagagagcttcaccaccgtcgaaaacatgaaggagctcaccgacttgatcaaccgagaattcgaacgttctcggggcgatgaagatgcagtcaaggccgaaaaggaggagcgggatgctgctacaatagtcaaacacgatgagacgcgggccgccatcattgtggagcttggcacaaagattgacgagaaaatttccgaagtcttggcgaagtatgaagatgcgcatacgtccctccagtcgaagttctcagaaaccgaacagagagatctggcacacaccgaatctttgacaagtacgagaagccttgccgaggacatcaagcttgtcatcggtgctatgggcgatagtgttaatgatacctgtgagcggttaagtgtggacacgaaggctctcatggaacaagtcgatcagtcccgccagcaaatggagagcatgcacaacgatgtgagatcgcaccaggagcaatctcaagctgaaaacgaaagggctgcagctgccactgatcgagtggagagcaagctccttgaattccaccctcgtattctggaatctgtgcaggagatattgacaatcgtcagccagcactacgaccactcccagaaatcagcagaagacttcaagtctgaactgtccgcattgtcttcaagtatcccagcaatgctacctgcgctgcttccaccggaaccagaccgtacacttgccatagaagatactccgctacacagcaaactcgacgatattttggaacatgctaagaacgacaaagtccacgagattttgaacactctccttgatcactcgaagaatgaccaactccatgagaagcttgatcgtgctcttgatcaaggagcgggttcgaatgatcaaatatatgagagactcaatgagttgttagatcgtgccactaatgggagcggtcccgttcatgagaaactagacgcactgctcagccgtccctcgaatccgccggaatccgatcactctgctacccagatggcgaagctggatgagatgcacagggatatcatggaaaactctcgcagaatgaatgagatgttcgctgcccagtcagtgctggtcgctgaagataccgagcgaaagcgacgtgaagctgaggaggctgcgattgctcttgaacgaagagtttcgcagcgtgagcaggtggaagcggagctcgttggcttgcaggaagagaaggattctatgctgaacatgattcatcgcctaagagcagaaaaggaagacctgatcaagcaaaacaacaagcttagcaaggatctgtccggtcttgaaacggccctagagatacgccacgaagagatgcggcagatggaggaccgcgcggatggccttgagaaacgcatcctggagggtgtgctcgaccatgctcgtactattctcctcggccgatccaatggctcgcaagccatgaacctgaagaggaaccgcagcactcggagtacccgttcctcacgcacaggcgctcgcagtcctagtctggcgagcactgctagtactgccaaagagcccagtcgcagtctgcttggtaatggtgtcggaatggctttgaaaagaaccccgacttcgctccaggctggaaaagttgctgtgcagcccaacatcggaaaggaacgtcggattcttagcttaagtcatgtcactggaaaccgcggtgtggaccgacaggtgagtgctaaatctggcatcacgaatttgaagcgcagccactctgtcaaatcgaactctcttcgcaagacttcttgggctggtccaatttctgttgtcgacaaagagaacgagccattccacgaagaggacgagcaagccagcgaagcggaagatgctggtccacagcgcaagactagttatgtgcaaagtaacgcacctaccaaccggaagacgagctgcgcagaatctgaccttggcactgaaaccgagcatggctatgcaccgagcaacgctggcactgaccgtcgaacaagctacgcagcaagcaatgcaggcacggagcgcaagacaagctactctggcagcatcgtcgacagtgtagttacagatgcctcagatcaacgccgtgtcagcggaatgagctccacgaattcatacaacgtggcggagagctcaatcgccgagcacgaccacgaggactaccatgatgatatttctatcgatggctccgatgcgcaaacagcacgagaggacggagagcattctgggaatgaggaccagaatgaggatcacgaaatgtcccgccagatccagcaggctaatgaggctgcggaagccgaagctcttaagctgttggctccctctagtggcagcactgatgttgcagtttgattgatatgttttgttttggatggagttgggcgcttgcaccatgaatgttttctttctttctcatataccacttttgtttctgcgtttcagtgcttggatgatttggatgactttcgtttgtgaccataaaggtgtattgtttaatgatgattttcttttgtactcttccaatacacctgtgatgtagttcgattgtatagatgtatcatgtatgtggtcacttgttgacgggtattgttctggatcacaaaccatatttttagctgcttgaaatcttccttcgaacgactagtccttgtagacctaattttccttttttcatcatctgtcacctttgtacaagtcgacaaagcccgacccaacgaataaggcaggtgatcaggtgactcccaacaaatcattgctgcctgaggctatgccgaggccagcttcacctggtcatctctctactccattctcggatggagctacatatttctcccctattcatggttattgggctttcctttgtttccatttccatttccagtttttcttttcccttttccatttcttcctgatagacaggatagggtgccctctcaaccgcatatagatctacattccgacctccgaacctcaaggagctttcccccacatcgggtgatcacagctggttgaggggacatcccacgatgttggaccctttcccaccgcctccggaatggctgcggagctttgtagagccctataccctccggttgaactgcccgacacttgccgaccatatccacgaggttatcgcagcgtttgccttctacctgttcatccatacagttctctcaccccggctctcgccaatcctctttcctcagtcttacaacaagctcactcctcggacgaagctgaactgggatatccatgctgtctcttttgttcagagcattgtcattaacgttgccgccctgtgggtcatgttcttcgacaaggagcgcagctccatgacctccggtgagcgggtcttcgcgtatacaggtgcctgtggacttattcaggctttggccgtgggatacttcgtatatgacctgattgtcagcattgtgcatgtgcgcatgtttggccttggaatgcttttccacgctgtcagcgccttgtgggtgtttagtctaggctttgtaagttgcgtctccaatctgcctgatataggtacattcagtatcaagaagatcagcataaatgcgttttcattttttaaaatcgagaaacatctaacatagtttccgcagagaccattcctaaactacttcgctccgaccttcatcctctatgagctctccagcccattccttaatatccactggtttctcgacaaagtcaacatgaccggcagccgcgcccaatggtataacggcatggctttgctcttcagcttcttcgcctgccgcctcgtctggggcagctggcaaaccgtcattgtgtacatggacatgtggaatgcgcttcagcaaacctggtctgcagctgcagccccactctctgaacccgtgagcatcaacgcacatgtcttctacccagcccgcgatggtagattgtgtgtcaacgaagcctgcgcgcgcgccaatgccgagatcaccaagttcaaggagcataccgcgggaggtgtaccaacgtggctggtcgtgacctacgtcggatcgaacttgatcttgaacttcttgaacttctactggttttccaagatggtcgagactgttctcaagcgtttccgcactccggctgatgctgctggcatgaagaaggggacgaaagagcctgttagcgcagagaaggatgcgcagctcaaggaggatattgtgcatgatgttgtcctcgaggcggcttccaagctggagcagcaggagaccgctattttgcaggatgagctttcctcgttgcatgaaaagatctcttcaagtgtggactcaggtctcggggaggagttgcggaaacggagagcagagcttgtcgcgaagcttcctttgcctggtgcttgaggtttggatgggactttaggttgttatttataatctatgtgtctttgagtgctgtgaagtcttcttccctcttttgtccatgcttgctttatgattgattgagatgtttgtgactcctttctatgttgctttcccttgaaattggtccgacctcttctatactggtccagagacacaacaacgcctggcgtgatggctctattattcaaacaattattgaaataaatccggaatcatattggataatatcggattcttagaatacagatttcaaaacaattcctgcctgtcataccccggctacaccagtccgaacaccacacaagcgccctatatcagattaaaaaaagaatacatcaacccatcttcatttcgtaatggttggcagtgtgaatatgcgactttaaacgaaaaggacaagcaggatatttaccgagcagccgcagcttcgggtttagccagcatgtaccgcacagcttccttagcaacctcagagtcccacgggccgtcaacgccgccataactgaactcaggtccgctaccatcctcgccgcctccacgggtagcttcacccatgatagtctcgaggtcgcggcgctgagagctgatccagcgacgaacaaaattggctgggtccttgctcagagcagtgtagaatgagtggcgagcacgggagtgtgtaagggcctggacaatcaaagcaacttggtcatcaagcgaggatatctggcgtaggccacttgtgtacgctgggttctgagtgagagccatcatcttggtgcgcagcgggtcatcaactgcgacctggatatcgtagatggtcggggttgggtcactgtggaactcttcatcgacgcgaatggtgtagggaagcttgattggttccatagggctggtgtgaggaccgatgctttcaggaatctgggggaaaaacatttgctcccggccaaagatctacagagcttgttagcggatactagaaacaccagacattcaaagtacataccgagcgtagacggtgatcacagcgcacttgtcgcttctcctcgtcttcttgcaattccatggctcggatgtaatcccagattccgagaacaattccactccgggtctcctcttcgacatctagaacctcggccaactccttgctcagcttgtatcgctctggaacttcgtcccggacaaggctgatggtgacattcagattgtcctgcgaggctcgggagaactgtagactatcaaattcggcaccttggggcgctggtgtgttggggtgtgtgttgggtttggaccagttaaccggcttaacctcctcggggattgccgagacgggcttatcaaagtcgatggtgatagccttgaagaaatgggagaagcgctgggactgtctcttggattcggatttctttcccttatcctcctcggccccgtcgtggtccatcgcatcttcatctttctcatcctcatcgggaaccgtagggtcggtttcatcgtccaacagtcgtccttcgatgcgtaccttgtagcggccggagcctgggttgttgcccgggccttgccatggctggttttcgacagtattagagatccagatgcgcatagtccgatacttcttgacggttttgttgatagagtcttggatatccagcctcttccgaacaacagcagcatccaatcgcttttccaaatcgcggaggtttttatattgctgaacaccctcgccgatgatcacatcttcaatgccgtcggggaggttcctgtcggtcggcttgcggctgcgccgaagggcagcatcattcgggtggggcataggacgcgatgccatgtactgttgggcaacagcgtgttgtggcatcggaacaggcattgcgccacctatagagacggaaggttagagccgagacgaatgagtggagacagatgaaaggggacatacctggccctggggggcgacggggcgcggctggagatcgctgtacatttgagggcatggcccgagcataatgttgctgcattggagcttgcattgtggagaaatcaagcaacaaaacggtgctgggaggatatggatggggggaaaagatgcgagatggtggagatgcgaggtcgcgattcttttgcccgtcgcgctttacccttttcggacactcgcgaataacaccgtcgagaggagaaaagtcattgttctacatgaaattttgcagttgagatttgatgaataattaggagctagacatataagatgtagttcacatgttaagtactaattacgcgcagatctaagggtaattattgatgtgatcgtgcattgtcttgattatttcctatcaagtcattgtctcaactgcattggacatttcccatcttttctattccaggagagacgcctggttagtatacagaccttccaccacattgccgagcttttcaatggtctctagtgcggcatcgtaagcttgatcccgttctgtctcatcgtacacaatcagacaccccgagccctggtccaatacaccgatgatcaccttgtccaagatcatctgagacagcttcctttccacctgctgtgtgtccaaacccaccatcttcgcaatgtggtccagctcgacccggctgaagggttcaatgaccttgatcaagttctgttccagcattgcatcgtaaagacgacggaggtggtttcggatgaatacatcgctgcccagttcgaatctgtagtccgaaagagccttctcatactcctccaaagaccggttggcgtgggcccgtgccacggccttcattgcctccaggcgtggactggcatacttttgcgcttgtttcgagccttgtagctgtgtgacatcatccaccaggttcagcatgattttgcacagaagcatgtactgcaatgtcgccgtggccaggtcgctctcatcgagcgagctgtacccctcaagcgcttcaatgaaataggagtatgaagtggtgaaatccttgtcttcggcgtgcagcatgccactctgcatatccagaccggcctgcaggttcggtggcgtgtaaacggaggcggctgacgtccgtgcagctgtcagagcagcgcgtgccttggcctggttgcccagagcgtggtacacacgcgactcgagcagttgtacttccaccagcataagcttatcatccaggcgcttcagctcacggagaagagagttgataagagtgagcgcatcgtaataggattgcttctgcatatagattgcaacgagtcgggcttcgagggcctggcggaggaacgatcgccgctcggaaatagcccattctatgcatgattggatgacgttgccttggagttcgagtgtgttggggatttcgctaatcaggtccagaagttgacggactgaataatcacagttaggctatttccatagaagtaatttagcgcgcaacttacctagcttggctgttttcgctttggcaaatgacgagaaggtatcacggctggtcttgatgaggtccgcgatctcctgtggcttcttcgcatcccgatgcaactcgcccagcccaatcaaggcatgttcgtagtctcgtgaagatgcctctgtagatccggggccctctgagagaatcttctggtaactggtcgctgctttcgagggatcctccttcaccagatctcgaacttcttggatccgtggcgagaccttggatgacatgataaaagacggcaaatggcgagtgagggagatagagaattaaaggaaaggagaacaatagaagatggtggtttgaagagaggttgatgatcaggtcgaatggggagctcgaagctggcggcagctcgctgtcctctcaccgcccgcttggcaaatcaaacagaaaaaaagttcgctcttggcatttttcttttcttttctacttcgttttcacaacggcactatggtgggtatttttctttgaaattatgtcttttggatagccatgctaatggattatagaaaatcaaagcactctcccgctccacggcgtcgcaacaggcccccgggtccgctgtcgttcgccagtcgcggaatctcgacccgactcaacatccttttgagcgggctcgtgaatatactcgagctctgaatgcgatcaagatggagcgcatgtttgctgctcctttcttagcccagatgggtaacggacacgttgacggtgtttactctatggcaaaggaccccggctcacttgaacgctttgcaagtggcagtggtgatggtgtggtgaaggtgtgggatctaacgacgcagggcgaggtttggaatacccaaggtcatgaaaacatggtcaagggtttgtgttggacgccggagcgaaaacttctgtcatgcgcgagtgacaagacgattaaattgtgggatccatacaactcatcatctgaggccccaccgatggcaacctatctcggaaatagtgccttcaccagtgtcacgcatcatcggagcctcccttcttttgctgcggcttctggtgtcatctctatctatgacctttcccggccgtcatccacaccatcgcagactatgcactggccgaccaacgttgacaccatcacatcggttgcattcaaccagactgagacttctatcctggcttcaactgctatggaccgctcagtcatcatgtacgacctgcgcacttcccagccggtgcacaagacgacattgagactggcatctaacgccatttcttggaacccaatggaagcattcaactttgccgtggcgaacgaggatcacaacgcctacatcttcgatatgagaaagatggaccgtgctctcaatgtcctgaaggatcatgtggctgctgttatggatgttgatttcagtcccacgggtgaagagctggtcactgcctcatacgatcggacaatccgcctatggaacagatcaactggtcactcgcgtgacatttaccacacaaagcggatgcaacgtgttttctcggcaacattcacgcctgacaacaggtatgtcttgacaggatcggacgatggcaatgttcgtctctggcgtgccaaggcatcggatcgcagtggagtcaagactgcccgtcagcgttccaagctagagtacgatcaagctctgatccagcggtactcgcacatgcctcaaattcgccgcatcaagcgccagcgtcatgtgcccaagccgatcaagaaggctggtgaaatcaagcgcgaggagctcaatgctattaagaggcgcgaggagaatgtgcgcaagcatactaagaagactaatctggcgccgagaacacatgagcgtgagaagatgattctggccagcgagcaataaatcgatccactcgattcgaccaggctcggccgcaagacttgcaatcgaaactatggtcgaatggggaaattttcaatgaagcagatcgttctgctttataatccaccctgcttggacctatacaagggtcccttttcatgattcatgccaatatacaccgctcggctctatttgagccacctatcaatatgtcttcccagatgtctgccggctttgagtaacagcagcatctatcccactcagatatctcgcaacccgctgcaccgtagcgggtagcacggcataccaattcacgagctttgcataaaaaggcaacctgatcacaccacctcgaccgctatcaatcgctgccaccatctcccgggcaacttcgacgggttccaggattggcgcaaagaaatgattcggcgcgcgcacccagtcgaacaacggcgtcgacatctgaccaacttccactagcaatgtcttgatcaacgggttaacccgaacttccgcttctatcgtccgatgcagcgcgctaagtcctgctttgctcgctgcgtagtctgacagtcccgcagcactcagttggcccagcacggagctgactgtgacaagagttcctccactctttgctgcgatgatcccaggcaagaagacttggtacagatggaaagccgctaggagattggtgcggattgtcttttcgaatgcgtccgctggcagatcaagcagtgagagaccgttgatcctggccgcggcacagttgataacgatcgtcggtgttcctaactgcaagatttttagcgaatcagaccccaattgaagcaagccataacgcgctatgaaaacaccttatccaaatatttaaatcactagaaccgcagtaatagtaggatgatatgggatcgaaggtcacaacgaaaacaaaagtaaaaaagcaaaacctacctcttgcaaaatcctctccctcgcaacttctaaagcacgtctatccgcgacgtcacacgtgatatacaaaacgccctccccaaagacctcatcgcggcctttttccggaacatctttaatatccagcacagcgacactcgccccgcgcatgctatacatctgcacaattagcagacctagcccactcgccccgccagtgatgaccacgacctcatgctcgaaatcgacttttcgcggggcgccgtaggcggcgcgctggttgataattcgcacgacgaagaggactgtcatggccgttgcatagcttacagcgaggatccaggctggatctgttgatggggttacatgggcgcgtaggcagaggacgaaaatccaggctatgaaagggttgagtagtgatttggagaggatgcttgttaggatgtcgattgtcaggaggctggtgtgtggattggtcgagccgggagttgtctggggtggtttggctgttgtttttaaaacttgaggatttgaagatgacattgcaatgtctgctttggcaataattctggctggagattggatgtcggggatgtgcaatgagacaacctggggagattccagacgcgtttggttttgcggggctgataagagataagacgatctatataattctgtcttgtaaaaagaaaaaggaagacagacaagtatctggagacccaaatctacagagtgatgaactaggaattggttggccaagctgggtttgtctatgaaattcactattcgttcaaaaatgttggctaaaatccagaaaatgtttcattctcactggatctatcccggtgcctttcatgacccactgctaaggaatatatgctaagactcggtaccgctctataaaagctcacaacatgaatagaaagttctagctatctttgtataaaagttccaaaaattggaacaaaggagatgagagcagagcccctttatatggcggacaacgggagcaccagacacgtacagtctgtatccgcagagatcatagcaaagcccctcaggtatccaaagatcgccagtcggtagcccgcatgtacatgcttcgtgccattcgcagcctagcctaggccgcctacagagacccgccagagccaaggataacaccgatcgccagacaacagcagacatatgttaaatacgaatctggagctgggtgacgggtcaacggttaaaaaaacacactcattaggggctacgatgtgcaatgtggacctggagtggtagtgtgaagaaggaagaaagaaggaagaaagtgggaggaggcaggtatttataccgtacaggctgtgactcaggtcgacggggaaaccacgatgggtcacgagttttgaccaaaagggaaggcacctgattgggaaggtgccgtcaggtttatgccagagctacatggaaacatttgaagacaacgtaagacagcccctggtatgaaagagacgagagaagattagaatagaaagaaaaaatgtagagaaagactggtctattagggtgtagtcaaggatctatcttttggagacgaaaatacgaaggcgtaagaaaccatacagaacctgtagagcatcacgccataaggacgaaattgttatagctgaggacatgaagaaagacataagatatcgaaaaagaaagtcagattcacgaaacatatttgatcatatcgagcatccctcgttcgttctattcttgacgaaaaagggtcatcgtaaatccacgaaactccccatgattgtgttagacagtgcacctccgacttaaaccagaacaagatcgggatcaatcaccactgcatacgctgacccagaggcgaagaaggcttcttattctgagcctgcttcgctgagccccggatagaatgactgaaggtaaggcaattcttatcctcagccatgatgtcaagatcgctcggggtcgacggcacctggaagccttgaccagcttcggggtaggcgcggtaatctccagggtcataatccgattcatgctgggatccaacttgtgaggactgagatggagacggagtgggggattgggagtatgatgactcgtcgtcggtgagcaggtcagagttcgaagaaacgaaagaggccttgcgagcacgtgcacctgcaggcgcagcatgcgatgtaaatctgcgcgtggctctggaaggcgtctgggaagttgttgttgtagtctggggagcagttgtggaagcatgcgtgtgaggaattccggtggaaacctggcccgcagcgatgccaccaagagccgccggggaagcaggattgggagccgtatcggaaaccattgcagcaaagagttcttcgggattcatggaagtagcattgggggctgcggtattagaattcttgccgatctgttggtttaaacccatgtcgctagcgttcttgaatgatggttcctgattttcccaatcaagtaatgcagaacgaacgttttccttcagtgtaggtttggaaacccgattattgtgtggtgtcgcagaaggtgacagagtgaaatctgtcacgggttgcatgtcccggggaaacataggaaccgacggccactcgtttgagactctcactataagcttgactagcgaatcatgcgaaagagatgacagatacgcccgtcgttcctcctctggataataatttccaccaatttgaggttcagacacaggctgcttcttcggtcgttcgacttttttcaatttcgttgcaccattcttttgatatttggtctgggctgcctgacgttgcttaggtttacacttgatgcaaaaccaattcatctccgaaatttcgataacctcattatgaatgtttggactgtggcatttctgatgccacggagcatcacatgagtcacatagaacaatcaaattgttcgaggggctgtgtcctctgtaacaggcggtacaaactatattgacctggcggttcggacgcttccgctttttagctgccactttgacaggccctttgattgtcacaggctcagcttgtcgaacagttggttgagtaatacggcggccagatcgagttcgatttgaatctagggcagtgctggcatttctatccgtttccgtagccccagctgttgtccaaacggcctcttcctgaggcagtgctggtgatccccaaattccccaggatatattgtcagccataagttccgggtgtgatgacagtggttggatcgcctcggagacgctttcatggtcaaatatgttgccctcatagacgttttgggggcgctccggattgatatcgggagcagggaggtccatgaattccgatgagaccctcatagtgagcttcctttcgaataagtatttccaaagaagtattggccgacgttctcttggaaaattagttgaacttgggagcgaaagaagagaatagagcaacaggtgatagaggcactatttgtgttcttctagggcaatccgagtctttcagcctactgcaaatcaaaatagacactgtagtgtttgccgagtgggcagtcgaacatagttggctcctctcaattcttcaattggaagtagggttggattgaagtcgtcgaatgaaagcctttgtatatgaatcacgtgatgttccaatacaaccttaaatgtctgtcgtcggtcgtttactgacgtatttcgcctaatgtgaggatcttattaatttaattgtagattttgatgcttttattcgtcatcaaagctatttcgttatctcttatgcggatctagtaggttctatatgaagaaggaatcgtctcaatatactacaggaacttacgaccgaaataacctagcaagtaatgattcatattgtagatttcttaatcatctttaatcttgttttccttctaaacagaaactagcagaattgcccaaggaaagcccatgagcgtatacatgtaagagatatgaccaaaaaggattaaaagacgccagaagaaccgagggtaacttggaatggctgtgatttccagttttcttatatacaggtttcgggaggtgtcgttcatggttctcatagattattcagggtttaggatatgaccccctcatccttcatgcgagcgatatccgcctccccataaccgaggacattacccaaaatctcatctgtatgctggcccaaagtaggaggaggcgtgcggataccgggcgtcgcttcggagtacttgataggggtgttgaccatcttgatgggaccacatgcaggatggtcaatttccgtcaccatgcctcgtgccaaaactgttcgtaacgtcagtgctgtttatatcacatgtaaaggaaatacgcagacttaccatgtttgtgattcagggttccctgaatgtcgttgacagccgcatagggcataccgctgccttcaaagatatccaaccactcctgcgtggtcttctgcacggtggtgctttcaatcataccgtcgatctccgcacggtgctgcacccggccactgttagtgacgaagcgggcgtccgtcttccactcggaaaagcctagtcgatcacacaacacgccaaaaagcctatcattgccaccaccgaagagaatatctccgtcgctggtcttgtagctccggtagggtacaatggatgctgggaggtgttagtttgggtattatacccaggagaatgttcgctgcttacggtgtgctgtgccccaacggccggaatccttttgcccactgataagtgcagagctagccaggttcgatagcgtagcgacttggcaatcactcaaacaggcatcgatgtgctgacctctaccagtccgaccccgagcaatcaaagccgccatgatggcattcgatgtgtataatccggtagtcagatcggtaacagcaacaccaacctttactggtgcaccatcccgagaaccggtaatgtgcatcaatcccatctcagcttctaccataacgtcgtagcctgcacggttgctatacgggcccgtctggccatatccggtgatactggcatagatcaattttgggtttatttcccgcagagtttcatagtccatgccgtattttttgagcccccctgggagatagttttcgactaggacatcgcattcctttgcaagcttgtgtagaatctcgacgcctgacttgtgttgaaaggatagaccgagggatttcttattccggttgacctatatccctgatcagtgctatgataatttttatatagcttcgagagaaggctcgtacagctaggtagtaagcgctctcgccagggccctttctggaagcatcttcgtactttgcatatggcggaccccaagcacgagtatcgtcgccgcgcacagggtgttcgaccttgataacttccgctctgtatttcgtcttgtcaatatcataggatcaccaattggagctgtttcatagctccgaaggttgatacataccctaaatcacccataatttgagtacagtaaggctaaaagcgtcagcttgaattacacagcctatcaagagatggactcacaccagccaaaacgcgtgtcatatcaagcacccggataccagccaaaggtagcgaaccatcgaccgaagctgcactggagtagcttcgtcctggcaccgtgcgccgcaaggcattgctaccccaggacaagccggatcgacgggcagcaacctggaatctgagcgcaaccgtcatgatgatatatacgaagagcggagcgaaacaaaaaaatgacgctcaaacaagaatccccgttaaatgaattctggggaaaccggcgaatctccgccaaaacgccgacgccgacaccgctcggaggggctgacgccgagggcacacggagcattttccttgtagatcatcaaccgcagctatgtttacaggtcttgtcgaaacgattgggagtgaggatatctttctctttgtaacgtgagtcaatcgctaacgtggttttactagctgtcacggccttggagcctattgacacctcatcgagcgggggcgggggaacgtcactcaccatctccgactgtgaggagatcctcaccgacgcacacctgggcgatagtatcgcagtgaatggtattttactctttcgttgtctataacacatgggatattgtctaaaagtgggctcaaggaacatgtcttacggtcactgcattcgataagacctggttcaaggttggctgtgcgccagagacactgcgacgcacaaacctgggttctttgcagacgaattcccacgtgaacctcgagcgcgccgtttcagccgatacccggatgggaggacattttgtgcaaggtcatgtcgataccgttgcggagattctgtctgttacgccggatggaaactcgttggtgttccgactgcagccgcgcgagagagatattctgcgctatgttgtggaaaagggctatgtgacccttgatggtgctagcttgactgtcaccaaggtcgtcgatgggcaggatggatactgggaggttatgcttattgcctatacacaggataaggtggtcactgcggcgaaaaagcccggtgactttgttaatgttgagattgatatcgtgggcaagtatgttgagaagagcgtgcagggatactttgctggaacctctggtggagatttcgctatcttggagaagatggtgaacaggatcgtcgatgaaagactcaagaaatagatcagagatacgaataccgaatctccgcaacttgacttcattgcaatattcggccaggacaagaaaaaatgagtcatttttagctttctatgtcctagaatgaactaatcggtacatttccaacatcctttgattatagcgaatacaaggcatacatctagaaattcgattagtgaaagcagaaaagcataaagcccgcaagtatatgcaagtattgagatcattctatagtcttagggtctatactcatcgtcgaggttggatagttcgacagacagcacagcgactctctgatcggatcaaaagcattactaagttcaatttaaggatggaggatgatggatgaatttgcaagactgcattatatgaagacaaaacctgaaaaacgcctatatgcctatcgggtatgtgacagtgacaagaaaattttggtccatatgacatggataagacgtgaagacggtgatcatttttgatacagtccactagtgtgatagacaagccggcacggtttgacttcttgggtttgttcaatcgcaagagccggctgtttaccaagcgatcaagtagaagctttcggaaaggtgtggtgtgatgactcgaagcagccatttactcctccatagactcgtccgaatcggcttcagagtcgtcatctgccgcttcaccctcaccttcagcgtccttgtcaaagtcatcatcgctgagccaatcttcatcatccatttcctcgtcctcgtcctcctcggctgcttctttgccactgcccctggccttggccttctcctgcttcttgcgctcaatgttcgccttctgcagcttctttctctgctctttctccttcctccgaacggcccagctctggtccatattccgcacctccttctcggatttcgtaatgaagtcatgccacatgatcttgccatcgcagactccatcctcaaccttcatcaagcgaaggcgcaagcgaggacccagctctacgagctttacagcccgcttctcaacaccggtggtctgggctggcttatcctggcccttatctgcagccttttggcgctgcatttcacgcttgtttaggactcggcgggtcgtgctctcttgaacttccacttcggcatcggtgtctagctcggtctcacttgctgatgtgtagcctgcagcggaggggtcaagcaggtaatcagcggcatcttcgagctttccaaggttaggaacggcggtcttcttcttgtcccggttccgaatctctttggggtccaggcgacggattcgtttcgatataccggtcttcttcgtggcaatggcgtagtgacggagagtcaagatatacgagtcgctgtctttttcggcaggctctcggttgagaagcatgacacggcggatggaagatagaggctgggtttgggggttgatgggagggaagagggattggaagatcgtagttgtgagggtctcgagccgcttcggcactttagaatcttcggttgcgcctggtgtggtgaagttgttcatgaccaagaggggcggtgtcttgtggtcttgtccgccacttttggggcgcttcatcgatctctcaacatccttgcacagcgaatagttctcgactttgaagtgaagggtaggtccacggggagtaacagcgagtcgcatatttgtgttaccagttgcggacttggaaaacaacataagatgagtgacacctaggggcccggtcataacggtataatctcgcagtctgttggatttgcgttcctaatattgcttgttagaacgaacgaacagaatagtgattgtgaaacataccttcaatcgcacagcggtatctggctccatcatacgacggacatccttaaccaattgggtcacactgctaccgacttgagaagcgcctattctaatgaccatagacttcggggtcttggccattgaggcagcgctgcccttcacaacagaagcattttggggcttctggtgagtgcgcttcttgacacgttgcttggccattttgatgtgagagataagaaaaataaaattggacgggaaaagcaacgaatactaaatcgaacagctcgaggttttttttttctccaaaaattaacatcagaaacagcgccggatcaacaatattgcggccccacattaaattatttcttttgagatagttgaacatcgacaacttcctttttgttcaaacacaaatcaaacatgccggttaccaagaagcgcaaggtcgcacacgcagtacctgctgcacctgttgaagacagcgacgttgcatcaaatgcaagctcttcaagcccccaaaccaaccccgatgttgaagatagcgcgagcgattcaagtccccaacccactgctgatgaccccaatgtcgaagctgcttcctccgagactgagcccagcacttccagcgctcccaaaacattcaaagaactgggtctgattgactcgctctgcgaggcctgtgacaaaatgggatacaaatcccctacaccaatccaatccgaatcaatcccgctggcacttcagggtcgtgatattatcggattggctgaaacaggatctggaaaaactgctgccttcgttttaccaattcttcaaggtttgtgcatatttgatgacatgtaccttgtatacaatactgacgagtcttctagcactcatggaaaagccccagccgttctttgggctcgtaatggccccaacccgtgaattagcgtaccagatttcactagcatgcgagtcccttggtgcaacaatcaacgtcagatccaccacgctggttggtggcatggatatggttcctcagtcaatcgctttgggaaagaaacctcacatcatcgttgccacgcccggcagacttctcgatcacctcgagaatactaagggcttttctctccgcaacttgaaattcctcgtcatggacgaagcagacagactcctcgatatggatttcggccctattctcgataagatcctgaaggtcttgccgcgcgagcgtagaaccttcctattctccgcgactctgagctcaaaggttgagtctctccaacgagcctcactgtcaaatccggcccgcgtttcgatctctaccagcaagtacgctaccgtggaaactctccagcaaacttatatccttcgtccttataaacacaaggacatctaccttgtatacctcctccacgaattcatcggccagtccgtcattatcttcatgcgcaccgttcacgagacacagcgtgttgcattcctgctgcgcggtctaggcttcggcgcaatccctctccatgggcagatgtctcaatctgcacgcctgggagcactgggaaaattcagatcgaaaagtcgcgagatcctggttgccaccgatgttgctgctcgtggtttggatatcccctctgtggactgcgttttgaactttgacttgccaaccgacagcaagacctatatccatcgagtaggccgtacagcacgtgctggaaagtctggaaccgccatctcctttgtcactcaatatgatgtggaaatctggcaacgtatagaggctgcgatgggcaaagagttggccgagtaccctgcgccaaaagatgaggctatggtctttgccgaacaagtcagtgcttcacagcgtgacgccattcaggcgatgaagcattacgacgagaagaaaggggccaaaggcaagggaaagttctcgtttaagggcaagcgaagtcgcgatgccatggaccaggaagagggctagaatttcattctggctcatttgctgttctctgtacatgaatagatggtctattttacgaatttggggcgtttaagcatgtaatttgaaagaacccatagatttcattactgcgtcaaaatgatatcgaatattttcctggaccatatttccggagatccataagagttgaagaggtattcgctgcctaaagccgcacaggctagtgtaataatttcaatacggcctagagaaacagcggtccctaggggcatttgtcagggccaagaatcaaatttggactagggaatctattaggcgctgcccgcctcgctaacagcgttggcgacgcgagtggcaaggtcgtccgcctcggagcggctggcagcctcagcgtacacgcggacggcatcctcggtaccactggcacgggcgaaactgcggcccttgttgtatcgagactgaagagactcaatagtgctctgcaggccagcgggagactcgagcttacgctcagcatcatatgccttgaaaatggaacggtcattgacctcgacacgcacgaggcgcgaaggaaggtcggtgtaggtgccaagccactctttgggtgaccagcccttgtgggcgaggatggcctccacaagaagagcgtcggacaaggcatcaccgacagcctggttaatcaggtcggtcagggcctgaaggctctccagggcgtgctgctgcgccggcgattgaggctcggtgttcttgatgacctttagggcattctcggagaaggtgacggtaccatgtccgttggcctcaaagtagacgccaacatcgaaccgcagtgcggcgtggtggaggtgcttcacgccggtgttggtgcagataatgggcagcttgaggaccttctcaatgtaatctgtgcttgcgccgttggcataggcggtctggacaacaccaattttcagcttcgaagcaattccagcattacgggcaagatcgccaatgaaagatgccgcaagggtggcaatgcggtccccgtctagaagacggaacacgttgctgtcgtcctggaagtagtaaacaatacgatcggcgtcaccgtcaagcgaggcacatcgatcgagcacggcagctttggaagaaggaggagcacgttgcttggtcttaacatagtcggcaccgcactaaatgaagtgttagtttgatcaaaattcgtgtgttgggcaggtggaagcatacatcagagttcagggcgtcagggttgatcacatcatcgttgacaatcttaatatcgattccagtgaggtacttcatcagttccctcaatttaggtccaccgacaccattggcacagtctacagtcaaagaaccctggaccttgactccccgcataaccttctggaaggagtttgcaagcttctcatagtatccttgctcagtcggctcgccatactcatattgtgttccaagtgtgttcttgcagcgaacaacataatgaagctgcggggtggtcatgtatttaaagtccacaaactcgacctccgtcgcggtaagcgcggcattcagaacgcctaccagacgggagccagaagcacgggtgtcacgagcgaagaccacacgagcggggttggtcatggtcacgtcgatttccttgacgagttcgtcgtagacatcggcgatcttatccaatggggcatttgccagttttgtcgcgtacgcctcccactcagcctagttatgacagtgagtacgtattccaaattcggtctttcagcgcaggccaatcttacttcaagcatctcgccctaaataaaatataaggttagacttgtcctaatagggccggttctatggcagggctcaatgggttaactcaccatagggtcaaccaacttgacaccattgtcctccgcggggttgtggctagcagtaaccataactccaatccattgtccgctaagcttcttcgaccgcaggcttgcaagcaagcccactgcaaaaacaacggtgttgaggaggtcactgcgcagccagattggtcagaacaagtcggcgtcaacaaaaggatgatcgcggggttctagagatgtggaggcggagtggatcagccatgtttgaagaaacttacgctttcatgcgaaactataagggagagaatgaaagttagccgagtcgctagagtaggatgttcatacaaacatacccctgctgtgccatacccaaataccttgccctcgggctttgtgtattgcaacgccgcatcggtgattgctttcttgacagccggagaggccatggcgcaaatgtgtgattagttataaagcaccgtaataggtttcaagagaagaggcgcttagaagcttcaggtaaagtcgaagtcgaagaagaggggagtactcgaaacaaaaaaaagcggctgaggggtgagacatggtttattgcgacggccttagcggtgagcgaaaggtggggaaatacagaccaaagcacggcaggggacgtggtaataatataattacccgcattagacgccgtggaaattaactgcaacgaaaaacattctggtggggagcactccaaccttcattactgctacctccacgtctaagctacagtcaagcatgacatattagtatgtctatgctatcctggggatgtatatctatatataaagatcgccgaattttgccgaattttgatcctcttcatgccttgagcctatgcgccgcaatatcgtcctgtgtgtccctgatcaggaaccttcgggaccaaccgatgcattagtcacgaaaacgtattgtgtcgttggaacgtgggggacttacgaataccaccacacagcggggaccactgtacccagatgccagaggctgtgcgcgtcaatcaacccattccaaggggggaagtcgagcagctccaaactcatagccatgattatccacgccacaatcataccaggccaggcggtccaagacttcaaatgtttttggtatcggaagatactgaatccggtccacataaggttctggataatgccaaccactacgttcgctatcatattgtaggtgtagtcccaagaccaaaaggtaagataagacacgtgcaatacatatagcagaacgcagatagcagtccaaagtcgacgcagagttggccgatatggaggattttcaaggtccaggcggaggattcgaatgacggcaaggtagagaccaaacagcacgttggcgccagccgcccaatagtccagtttctcggtcagggggaaatcgcgcatgtgaaataacatgctgaaactccagcttgcgagtccaatgtatccaaacatcatgtagtatgggcgaagtgagtgccaactggggatcgactcttggatacgggacatgccgtgccagtgggcggcgaagttgaagaacgagaagagcaccgagaagggctcctgcatccctaggagcctacggaacggccatttcccgtggaattgtacaatcgggctgatcattggaggatcacgcgaaactcgacggtcggtaatgacatgttgacaggtgtagtcacattcagcagggcaggtccatagtagcaagcggaggtgcagcgctaaatagatcagcaaaggggaaacgcggcgaacggttggaacaatgatttgacatacgtagcactgaatttccgtgctgacaattttccgttttacagacctatggttgttagtcgtttccaagggtctgttggtcgcgggagtcgtacctggacacattctttgaagtcggggaggtggtctcctaatgacgcgttggacctgccaatgagggaggctagaaaaacgagagcgaaaagagtgtagagattcacttttcctacgcccagattcattgtgggccaaaagattagctccaaggtcttaggcgttcaacgcgtaagctttggggaagaatgacaggtaaggcggagctcccggcatcgaagagcctccctcggtggtcttggcaagatcaaaccagctcttttgtttaccccacagcgacatcattgatctactttattcaacttcaatgaatgtggaattggcattgtttatcatccttgtcaaatcgcgttataacttggagatcttggtagttcactcgaaaggaaaggcagggccaatggcgcaagtaatctactttgaatattagatatcgtcaattgatgctagttatccttgaagaagcgctattcttcacatagatgccattcaaatagagtgcaggtatgcattagtataactacgtagaactccgtacaatatagctgtacaactatgccacgcagatagccctatagaaatgagggcaagtagtgtcacgtgtgtcacgtgcgtatacacgtgatctcccagtacggctagtgcgggcggggattggagttaagcttggcgggcgggcaaataatccagaaaaaaaaagttacggatcgatctctgttggacttttatctttgacatccttcctattgacattttttttactcttgtcgattcttccttttcggcccgttctttttttcgcacagtcaagatggataccggatccgatagccctcagggcatcaccagcagtgctgatcgcatggttggcatggagcactctgaagtccgctacttcactaggtacgctattctccgttgattgggtatgttggaagttgatgctaatacatttatagttacgaccaccacggtaaattatctcgatccgtgatagcgaaatttttacgtgctttttactaacggtcattttttgggctgcaggtatccacgaggagatgcttgtaagtacaaatacactggctagttgactatttccagtctctaactttcattttctactttctagaaagatgatgtgcgcacacgctcctaccgcgactccatctaccaaaaccgccacatcttcaaggacaagatcgtcctcgatgtcggctgtggaactggtattctgagcatgtatgtatccgcttgattaacaacaccgtgctcttagatatcttgttgactgttttgtttaacaggtttgctgctcgtgctggcgcaaaacacgtcattggtgtcgatatgtcctccatcatcgagaaggcccgtcagattgtcgatgtcaacggactgtccgataagatcactcttctccagggcaagatggaggaagttaaccttcctttccccaaggtcgatatcatcatctccgagtggatgggttacttccttctctacgagtccatgttggataccgttctctacgcccgtgacacctacctcaaccccggtggtctgatcttccccgataaggccaccatgtatgttgctggtattgaggatggcgattacaaggatgataagattggatgtaagcaacaagtctaccctgaagctgtttttcttcgacgtactgatcattttcagtctgggacaacgtctacggatttgactacagccccatgaaggagattgctctcaacgagcccctcgtcgatactgtcgagatgaaggctcttgtgactgatccctgcccgatcatcacctttgatctgaacactgttaccacggccgaccttgcattcaaggttccttatgccctcacggccaagcgccccgacttcatccacgccttgatcgcctggttcgatatcgagttcagcgcctgccacaagcccattcacttctccactggccctcacgccaagtacacccactggaagcagaccgtgttctacctccgtgatgtcctcactgtcgaggaggatgagcgtgttaccggctgggtcgagaaccgccctaacgataaaaacaagcgtgacttggatatcagcatctcgtacaagttcgagacccccgatgccacccgcgctgctgagggtggttgcttctaccgcatgtaagttcttgtgctgttttgctttggttagttcttgaggtcattatactaatgcatcgtaggtgttaattttcttccacttttctctaatttgatgtcattgggatgtacaactgtacgtttgcacggtctaagtgaaatattttcgtctcgcaatgcatcctggcatgggcatgtatgaaattgcccgaggcgaatcggacatctggtttcgcctttgtttatttcggcgtttaattctcgggaggcaggaaaaaatgcattttgtggcgcgaacggagggatataattctgaagctcctcgaatttccaggtagatacccgagtcgatgcttagtctagcaaactccaacgctcttcttctggacatgttttccacgctacgatgtagacgacaccattggttgaaaaagctttcagcgacctaacagaaaagaatataagatctgcagggggaaattgtgccaagaagaggccctcatcggcaaacccacggcaacaaatccaaagaaattatcagatcctcggctccttgatggcccccgcaattaccggagctactttagtgtgccatctcctttattttcttgatttcccttacccttgaccctcttttttttatctgatcttatattcatatctccttcgtactaccatcccaatgtcggcccctggagctggtcacgaattccccgcccaagaggtttcttggcagaagcgcgatgtgctattgttcgccaacagtattggtgtcaaggccgatgagctgcacttcctctatgtatgccacgagccacatatacactagtctaaatattattctaactggtatccaggaactccacccgaacttctcggtcttcccaacctattctctcatcctccgtatgttgatcgcccaaggaatggtcgggcagcactaactccaaagctattagcattcaagctcactgatcaggaggtgactgatttctatgcccgccaaaaggcagttcacattccaggcgtccctgacctggaccatcgtcatggcgtcgatggtcagcgtaagatcacgatcctgaagccgctccctaccactagtgcagggcgtaagtttgagctacgcgataaggttattggtgtctatgataaaggcaaacctggtactgtgatcgagaccgagcagtctattgtggataaggagagcggcgaggtctacaccaaggtcgtgagtagcggtttcctagtcggacagggtggctggggtggcccgaagggtaagattatagttcccctatccagcatagagtatcaactgacatattcgagcaggacctagcaccgtcaactatcccccgcccgagggcagggctcctgacgctacccatgttattcagagcaactctgagatagcccacctgtaccggtaagtactcggtgcaaacagaattcggcttgtatacttgaaacgtctgatgctgactccttgcccagtctcaacggtgactacaatcctctccatgccacaccagagcccggcaagaagatgggctttggaggtattattgtccacggccttttcagctggaattcagccgcgcacgggattctgcgtgaactcggtggtagcaaccctgccaatatgaaggagttccaggctcgctttgcctcgcccgtccggcctggtgataagcttaccactgagatctggagaatgggcaatatccaggatggctatgaagagatccgctttgttactaagaatgacaagggtcgggttgtgttgagcaatggccgttgtctgttgaaggtgacgggggcgaagagcaagctgtgattgattatgccaaagctcggttcaatggcatgtaattggactctaaatacatacctaggtatatagcaaataccttctttatcaccacgtgccattttcgtagaaagtgaacttattgatgtccgtatagttccttatatatatatgcacgtgaccgcaacctcggttgtcccaccctacaaaaattggccaagcactgctacatatctcctcgttcttgaccctcccttctttctctataccgattatgagcttcagttggcgcacagcgctcaggccgagtgggctgtggagtcgcgccgggtaggaactcccattcatgtcgaattgaacgttcaacgctgaaaccctctcggattagacccaagagcctgagaccccgctattcccttgttagtgatttggtatggatttagcacatcatttacacccgagtcgattacaaaaaaaactaactcgatctctctgttctgttgttcatagacaactggccaccgacatgtcactggttcctccagattgctgaacaccaagatggcctcgaatggccctcaggttgcttggtctaagtccgacatagtaacctttccaggtaaggatagaaaggatctggaaatcccgttaaacttgtaagtttgttataagtccaaggaaggtgaatagcagctgacttcgattttgtagcggtctttttttcctcaggttagtgaccaggatataaaagcagaggcttgacctccacctcttattgacaacttggtgcccacgactagagaaaactgccagtgtcccaaatgtattcatccggatacgatgcagaggataagcaacactttctcggtaggaaaattacggctccttgtgattacttgttatctaatactacgcctacagattccgcaaaacgtcaagatagaatcaatcgagcacagtgacaatatggtcaagatcaagtgtgagagacgacatgcataactttgaattaccatcagaactaacaccgccacagggtctgataatcacacgggactttattcgtatgattggcttcgtgcacactcgcaggacttatctagcgttgaaggaaccaagtcggtgccatatcctcaatcggcattgcaaagtcccaggtaagttattcaaagccaaagaaccagagtcacaggattatgttaacaccatggaaggcatttcaccccagtcgtggattcagatcagagtcccagagtcaaatatgacgatgttatgtcagacgacaaatctcttcaaatatggctgagccatattgtaagcccttctgtcttgactccttgatcaaacttgctaacaattactaaagtgggatgaaggattctgctttgtagacgacgttcctatcaacccagaggcgacccaatctctcatcgagcgaattgcgttcatcaggaacactcattatggtatgtaccctagatcaacgattcaccaatggctcattcagctaacatagcttcaggtggcttttgggacttcacagccgatttgacttttaaagacacggcatacaccaacgaattcctcggtgctcatacagacaacacttatttcacagatcctgcaaggcttcagctcttccatctgctatcccataccgaaggatctggaggagagaatctcctaattgatggatttgcagccgcaactcaactactccttgaaagtcctgagcattatgcccaactggtaaagcataggcacccctggcacgcaagcgggaacgaagacacctgcatccaaccatccgccatggcaccggtattttcgattcatccggatctcaataaaatgtaccagatccgctggaataactatgatcgtgcaccaaagaccaactggtcggcatcggaacagaccgaatggcaccgcgctgcgcgccactataatgagatattgcagaccagagaagtgtggacgaagctacaaccaggatcggcactcagtaagttctttgtgccattgtgatggctacttcagcttacatattttgtcttagtattcgataactggagaatgttacatggtcgctctgagtttactggaaagaggcgaatgtgtggtggctacggtatgtatttctgatagcgcctgttaatgattttgtactaacgaagtgccagtcaacaacgatgactacatttctcgacttcgcctgctcaagttcggccggaaagaggtgctggacaacctgggcaacgttggagacaatccccagaatccttattggttcatctaggttctgtggtacctgatgcaagataaatccacagaaaatcacattgtataaagcaaaagtgattcaagtacggagtaactagatagaatcgaatcgcacttgattataaacttagatcgcatcacgtgatcctctatggctgacgttgttggagctcggccaccgacagctcttcctctttccccatcttccccccatcctttccaatctacccacctactgtctcttcatttccgagctttttaatttagttatctcataattcgcaatttctcgattccgccatgtcgactcttgaggacctcgaagaccttgagcaggagcagagagagaagaagcaagaccagaacgatggcgatggcaagaagcccgaaggtgacggcgatgccgacatgacagacgccgataaaaaagacgaagaagaagagatgctggacgaggatatcttgaactcaagcactgcagacattgttacgcgacggcggatgttggagaacgagatgcgaatcatgaaaagcgagttccagcgtttgacacatgagcagagcacaatgagggagaaggtgaaggataatcaagaaaagattgagaacaacaggtgtgcattcactagtccccgtattcgctgttctgcaagcccgcggagctcggtggccggcttgcggatcggcgaaaagacactttaatatcaacagtccactgacattttcatttgtgactatataggcaactaccataccttgttggaaacgtcgtcgagctattggaccttgatgtggaggcagaggcagcagaggaaggagctaatatcgacctcgatgcgacccgtgtaggcaaatccgctgtcatcaagacctccacccgccagacgatcttccttccgctcattggccttgtcgaccatgaaacgctgaagcccggtgacttgatcggtgtcaacaaggactcatatctcattctggacacactaccggccgagtatgacaaccgcgtcaaggcaatggaagtcgacgagaagcctacggagaagtacacagatattggtggtctggataaacagatcgaagagatcgtggaagccatcgtatggcctatgaaggaggcagagcgctttaagaaaatcggcattaaggcccccaagggtgagttactttcctccttcccctgtgcttcaaagctaacattcattttccttcccaggtgctttgatgtacggacctccaggaaccggtaagacacttctggcccgtgcctgtgccgcagagacgaacgccacattcctcaagctcgccgggccccaactggtgcagatgttcattggagacggtgccaagcttgtgcgcgactgctttgccctggccaaggagaaggcgccctccatcatctttatcgacgagctggacgccattggtacgaagcgtttcgactcagaaaaatccggagatcgtgaagtgcagcgaaccatgctggaactcctgaaccaactggacggctttgcatcggacgaccgtatcaaggttctagcggcaaccaaccgagtcgacgtgctggaccctgccctcctgcgctccggtcgtctggaccgaaagatcgagttccccttgccgaacgaggaagctcgcgccaacatcctgcagatccactcgcgcaagatgtccgtcgaggacagcgtcaactgggccgagttggctcgcagcacagacgagtttggcggtgctcagcttaaggctgtttgtgttgaggctggtatgattgcgctccggaagggtctgagcaagatcggtcatgagaactacgtcgatgctatcgctgaggtccaggctaaaaagaaggataccaacatgggcatctacgtttagagtagacggttttcctttttatgtcccgatccatacactttctctgctttgttgcctctttgttccgagtcatctcgtgtatgtatgctccctcggcttgaatggaagccggtaattcgttatgcatgaatggagaattcttattacgattttctttatatctccgagtaaatggcacttaatcttttaccatgccgtgatactctgtggcggagttgtactcgtagacatagatattctgattaaagtcgtgtttgatcactggcattgtggcgtagaacaataactgccactataaccattgatgcatagtgaataccacaacagcctagaaaatccccaagaggaaaaaaaaagataaaaagacacgcaaagatgcaatagtcataaatccataccaacaaccgtggctcatcacacacacccgcacaacttccaccatgggttttatataaaagaaacaggaaaggagttagaaaaggagaatccaaagagtcaaagacaaagaacaaaaggctccctaatcagaaagccgccagttccaagtctcaattcttaccctgggtatccttgagagtaacaatgcgattaagcaccaacttctcatcagtcgactcgcgatcgacagcaaagtacgcaacacgcattccctggaagcgaatcgagtgcttgtgctcacccggctccgcagcaccctcctccttaggccacggcgccgagcgggagatatcccggattccagtctcgaccatggcatccttgaagatctcctcggagtccgggttgatatcggcgaggaaaccggccgggtgggcagagggatcctctgacttgaagagcgagttgaaggcgcggacttcggcgcggacggggctgttgtgcgcggccgactcgccgatccagtggatgaaggacttgggtttcgtgggggcttcgccttcggcgggtttctcgtatttggcgtgcacgcaggtgacttcgccggtggcagggtctgtttcgaaggaggtcgccgtgatggggtaggggactttgaggaggccgacggttttgccgggggcgaggcggaagtagtctggtgagtcaacggcgcggaagtccgagcgctcgatgtagacggtcttcgtgaaggggatgttgtgggtgccgaaggctgggtctttggagaaggggcagtcgatgagctcgaggtggtcttccgggaggtcgtcgatgatgaccttcagcggctcgagaacgaccatcagacgtggcacggtggtctcaaggtactggcggacgatctgctcgaacttggtgacctggacgttggtggtgttctttgttacgccgaggtcgttgacgaaggagaggatggcaccggggggcacgccgcgacggcgcagtgcgatgagcgtgtacagacgtgggtcatcccagtcgcggacatgtccttccttgacaagctggatgatcttgcgcttggagagaacagtgccggtgatgttaagacggccgtactcgcgctggttggggcggtagacctccagcttatcgcagagccactcgtacgagacgcgagagagctcgaactcggttgtgcacagtgagtgcgagatttcctcaatgctatcacacaaacagtgcgcgaagtcgtaggttgggtaaatcttccacttgccgccggtgaggtggtgctgcttgtcctcggagcccatgatgcgccaggcgaacagatcccacatctgcgggttcgggtctgtgatatcctgcttcatgcgcagagctgcctcgcccgccttgtattttccgtcgcgcatggcacggaactcggagagggactcctcgatgggtcgtgtacggtggctgcatgagaagcgttcaccgccgcgctggccgccctcgatctcaccacgctgggccttgatctcggacttgttgcaatggcagacgtatgcgccatcacgcttgatgaggtcctctgcgagctcatagagacgatcgaagttatcgctggcgttggtctcacgcacaggtgtaaagccgagccatgtcacaatctcccgaatggcattgtagtaccgctcctcctcgccttctgggttggtgtcatcgaagcgcagaatgcactccccaccgtggtactttgcaaatccaaagttgatcgcgatggccttgctgtggccgatgtggaggtatccgttgggctcgggtgggaatcgcgtgcggatcttgggcacggtctctgaaaggggcttttcctggtacacgtcgtgcaggaagccgaccttgaacatggcttcagggtcacggggtgcgggagcatccttggccttgggtgcctttggctctccctttgatttgggctggtcctgtcttgctagcttagccgccgccttcttagccgctgcggcctctttcttctcctgactcttggacttcttgggtggatctgtaggctcggtggcttccttgggcctctcaggcaggtcgacaggctttgcggggtccattgcgacggataacaattgggaaagcgaaggtgggggatatttttttctcacgaggggctctttgtattcaatgcttatcagttgacattcgcttatcggtccgattcagcccgggatgagtcatcttctatactgccagagaataccgacctgggcccctggatgccaagtgactatgcatagggcttcagggctatttttacatataatgagtcatttcatatgcggttcaattcttaatttgtgatcaatactgtacaaatatgatacaactatgatacagggagtacgcagactcaaaaaagacagaaagaagcacagtgcacattaaccttccaccgatgcgccaataatgatacaacaatgaaagacagttcgaatgaccagatccaaagcataccggatcattatgcaacgctatccccgtacatctgacacagcaatgcgtgtatcatgaaccctgtacaatgagataagaaccagccaactaaatgatcggaatgaaataagaaaaacaagagataagaaaaagagaatacaacaagtgtggggtatatggcgcagaatatgtagacaagaaataggaggaaaaaagggatcaagaagtagaaagatcggggtcagaaaagttgtttaatgtcaacgagctctgagttgcccggacggtcacgctccatatggaaccaccagtcccggcccgttttgtggttccaggttccagtgcaggtatccttgtcccaaggcaaggccgagccctgtacactactcataggcgtgcttggagtcgtgggtgtcgttggagacgtacccatcacagaccgcccacccaagcttccccagccaaacctggaaatggtggatgcaggcgacatgatatcctcgggaggtgggataaaggggctcccgctgccgaagcagttgacgcccaccccagcagcatacaacagtgactgattcgaggctagcaattgtttccacccaatcaagccaccgtctgcctcctgaccggtgatatcaggacggaggatgaagtgaggaattgatgcgcccgttgcaggatcgcggaaaccactacggcccatcaaggttggcatgcggaactcgtagaccgttttggggccgctgcagtcattagcctcatctttaaaccgctcgcaggcagcccagatcccgtagtcatccatttcctgctcgggctcttcttcgaattgggagttctgcgcgttgtccggcacatacgtgtccgagtaatcttggatcagaacccgcatcccggcctcagtgtccttagcggccatgtctatgaacgtctgggcacgaattcgggctgaggtcagattatttcccgccggtagagcgagcggtcgagtattcacggaaccgtgggagctgcggggcagactgtaccggtctggtcggagtaaggcttgtccctttaatacaggccggcagacagcctggagggcacctgggggttccacgtcgcagggtgcgcggagagcttccagttgagggaaaccagcggagatgatactttgggcaagatgatagttgggggtattggagggttttgtgggtttctggaaggggagggtatcaagctgggtgagggctgtgcctgggtctggacatgccacatcccagtggaggtattttaaagtcgatgaggccaggataggctggaagaccatatgtccgtctggcaaagttggacacttttccgtctggactatcttgaaccgctcgagtcctcgtagtgacgcgaggagtttggagatgactagcagtgacttgatgttctgctcgactaggacgagtgtcttgagggagagtgattcgggtcgcgacgtgtactgtgaaagaccagcatctgtaatcccgggcaggttctccaaccttaatgactccaagggtggcagacacatcaatgtgctattatcaaaggagtctttgttgaaagaggtaatgcaaaggtttcgcaatgagggaaggagattaaagatgcgtagggagatgctaggttccaatgcgccatttccgttcaatccataaagcatcagtgtctccagatttgtccacgacgtatggtaatccagaaactcgaacatttgcgaaggacccagactcccagggcaggagtcgtcgcgcggagatagctccggcgctcgtgcggcctcgcccaaaacccatgtgtgctctttgagctttttccgggtcgacaaagcatgggtcagacgatcgaattcatggtgatacggaatagacaagcctaataggcgctctaagttcgggcacaccataaccacggacgcgaccaggtctcgatactcctgccactgggtaccttgtttcatggtaaagagcaaatctaattggggcacgcgtagttcgtatacaaggttggccagcaactttcgttcgcggagggttcgtctcaagagcttcagacgactccctcttttgaggcggtatttcttgagttgagccggagaatcatttccaacgatgtgtatactgtgatatctagtatggtatgttcagtcagcaaacactctttggacttcttcctaaccctgaattaatcaagggggctggactcaaactcacagaggtcctctaacggccttttcccaggaccgacaggtcaaggccaaggcgtgtaaatcgcgttgaaaacacgtcgtacatcctgtctggtgctgccctttgtgcaactcttctaaatggtggattatcacttcgtagacctcgtgtggtattctgcgttgaattggctcggttaacttgggaagggaattgaccgagtcgcattgacggtaagatgaagccggggacgatgggggatatgtggtcggcgcggttgacgcggtatagttggttcggtaggaggataccgaggaggttcgtgaatgaacggcatcgtcgacatgattcccggggatggaattgtaagataccaccggggtctctgttctaattgcgacaacactcattgtgaatgtgatctggcatcggagcaaacgacgcgagacgggaaaaagcagtgtaaattcccaatagggaggtggaggggttcgggaatgtagggaattcggaagatggcgtaagatatggagatcggcagattccaaccgtttttatatagtcacacaatacacgtattgagcaatccgatcgagaaacgaggcgaagagaaaagagaagggaagaatcataagggatatgtgagaatgaaaggatcagacacgctctaagaactagcattggataatcaaaaggaaaaagaaaaaaggacaagaaaagaaggaaagactattgtcagtcgatctcccccacatcagggaatgagttgaaggtccttacccgtggactccattcagactgtaagccgtgcagcatgcccaagtgtaggagcggagacgggaagaggcggttcaggggttggccctatgatttttggtacagccggatgtgggaattagacatatgtagtgtttatattgtacattactacagtatagaatctttgaatatctaaaatcaagaactgcaattctctgatatccctacaatacatccaaacctccgtacacaggacacgccaaggaacattgaatatcaaaaacgtccgagggttcgtggacgtgaccacgctatggctccgttaggtttagcgcgatgggtcggggcagttttagtccggttaagtgcattttaccccttttccgtgtttttcttttcttttctctttgctgttggttatgttgcgcgccgtgatgttattacatgtatcttattatctgttatctcgctatctcgttgcttttatccccatttagaatgataacactgtaaggcgtttcagtttatattgttcccaggttatcccctttctatatctaaacggcccaagcgcatatcatcctgcaggccaatggaataggcaattgggcggggacgccaattcttacttttgacttcggctttattacggagtacttcagaatggtctgcgcgtcactgcatggcataacgggatcgacatatatatcacttttataattatcagcatgctcccgaatataaccactatcacatagtctaaccttggatcgtacatgttgtacctattattaaacttaaaaaaggcatggttcgactcaatcccctagcaacaatctcccgggacaatataaatagcaagatcagcgaatcggtcattcacatgtaaaagactcaacggatagtacggaggagtccatctacataattccccttgacatgtaacaatgtatatgtctgtatgcgctaaccaaccaaaagcggaacgctcggctatgtatgtatatttcaatccacttcaacaggtcggaacatggaagagtctcacgactgaaactccgatctggtggagacactctgagggtcctaagtccaatacggccaattgcaccaatcgatcttgttgcgctgacgactagggcttgatagtgccactctcggggtgttcctaggttcaatgcaatctcccgtcataccatggaatatagcatagacaattaggggtggatattcggtagctgtgagagaacacatgtcgtatgatggcaacggtccttcacggagtctgtaccgagctgctccataataactaactatatactacacagttagtcactaccttggacgtggttcggacggaaagatgacgaggcaagccaagatgccgccgacgccccatacaagcgctattccttattgtcgagtagaaaggctaggtgtcattcaaaggaccttactattcagagcacgtgagagcatctcacacccatggacagaccatggagaccagtacatggacgagaaacactaatgactctgatacgaacatcaaagtttaaatgcatgcaagggaggggctggatctagatagtgtttcctagtgctgtgtacttgtacttggtgtttatatttagcatcaacctcaaaccctcacagtttcgccttcgccgtctccttctcatcccccctaaagcgataaacaacatccccaaaactgcccgtaggaaaaacataataccacctcaactccacagtcccagtattaacaatcccatgctcggcatccgaaggaataaagaccgtactcccagcgcgtactttgctcacaaccccgtcgatagtcacatcgccctcgccgtcaaggatatgatatatctcagcctgtgtgtggcggtgcgcgcacaggtggcctgtcactggggggcaggttgctattcctgcgcacaggtgtgtggactctgtttgcggggatgagattaaggtgtgccaggatatatcgccgtggattggggctgggaatgtttctggcgatgttgtttgtgtgtaggtcgaggggaggattgttggttttggtctttgggtcatttcggtttttggatatggatagactatagtgggaggtgttgatgtggttctggtttgcgggggggagggtttataatttatcttctctgttaggttgcgccttccatatttacatgtgttaggtagttctcaaacggaagaaacgaggtggggaaataggaagtggcagatgtagaaggagcgtggttgtcgaggaaacactttcctaaaagagaaagtacgtcccaccgaacatgacctacactccgaccttggaaggctgcatgcattatgtgcctaaaacagatcgcgggataagaggagcagcagtgataggaaagtatcgcaagtaacaaagaactccaccgctaatggatggattatatggaaaaatctgacattcgactagaacagcatatccgtactcccatgcaaatgcggaagcagatcgagccccataagacaccgatgccagtctgaacgccatgcaaatggacctagaatgaaaccttctgctacaactcggttatcctcgaatctgcgtagcttcaatcaacctggacatgcaaagaaaaagaaaagccgtgaggaaacatcctcaaattatcaccgtaccgtgctggaacagaaaactccacgaagagcaagcaaagggagaagcaggaaagaagaccgaaggaaagaccggagaaaaacgtgcaggtatcgaaattcaggacatcaatcccagcggatagagaataaagttatcaacactgtgccggagacaggatagaagacaaagactaagagaggtcgctttgactaatcgccccagaacatgatgactgacaataaaggtgcacaatgaagattacccaaacccaactccaccaaacacgcaagaaacccccgggatttcctctgaaactggacatgaagaaaccgaccgaaaccccggggagagggggggtatgtgactgggagccggcctaggaaaccgacaaaacaaacgagcaggttgtaaccataacaagtagcgagtctcaagattagtacctaggagtggtcctacgatcaaagaatgatcaccatctcaacccggcgtccgacagaacagtaaacagactgaaaggatgaaggaaagaaaatgggggcaaaatccgcagaaacaccagcatgagaagggaacgggaatcagaaacaagacgacgacggtaaatgggaattgaaagggaaagggaaacccatatttgcgggttggaagtgatgcaatccgaaggcatgtacaagacaagacaaagaaataataatgtatgccagatcaagactccattatcatgcagtaggagaaaaaaataaaacatgatcacatgtcggtatcgtcaacgttgaaaatcccgggttcggtgccgtcgtgcgtcttctggacgcctgtcatgcgctggtcgaccgagttgccggcacggtggcctcgtcgccagtgatcgtcgtgcatggagtcctcttccatatgatcgctgtcgtccataaggtgatggtctatagaactttcattcacaaaggtgaagcccttgaaattggcttgcatcccgggggataagggtgtggaggctggcatgaggccgttggcgagattcgcggcgcggagattgagcgagttgttcagctccatagcgtttgtgaattcgggatcgaagttcgatgtgtcggtttcagactgcagcagcggcttgaacggaggaatcacttccttgcggcacagcgtttcccagttgatgtcgtggaagaatgggtgtgccatgagctccttagcatcgccattggcgccaagacgatgcttgggattccggttcagcagacccttgacgaagtttcggccctcggagctaagcgcatcacgggggaaccggactttgccgaatgcgatattcttatacatctgctgagtatcctcggcgtagaacggactccagccacagcacatctcaaagaccaagacacccagggaccagaagtcaaccatcttcgtatatccttgctcatcgagcaatacctccggagccagatattcagtggtaccacagaaggtattggtggtgtcgttttgtgacaggtttgccttggataaaccgaaatcgcagagcgcaatgtgaccgttggcatccaacaggatgttctccggtttgagatcccgatatacaatgtcgtggtcgtgcagatgttgcagagccaggatcaactcggctatgtagaacttcgcccgggcctcctggaaccgaccctcacgctgcaagtgccagaacaattcaccgcccgacatgtaatccgtaaccaggtagagatctgttggggtttggaaggagaacttcaatcctacaataaaaggagaggccgtcatcgcggttcggactaagatattgcgctcaccgagcgtgtgtatcacctccttcttctgaatgataaccttctttgagagaaccttcatcgcatagatacgctgtgtgtccttcttcttgacttgatagacctgtccgaaagttcctttaccgatgagtttgaggacgaggaagtcatccggtccgacctgcttccgatcagtcctttcaaacttcatatcgagatgaatttctccagacacttggctgtcgccggcaccgcgcgcgaccaagggaaaccagccttctagtcggctgtgatcctccttgaggttgatgcagaggcgtacgtgacccaagaaagcttcctggttgttacggtcatagactgtgacatcgagttctgattgatctcccataacatcacttgaaagaacgtgttagtgagtgacacaagtgaaggagttggggtggggtaacatacaaggtggcctcgtgatcccagtgcgggtctgtcacgggcgtccgtcccttgtgctcaccctcgacggcactgttgtgagagctggatcgggtcttcaacggaatagccatgggccgaccagcagcctcctcggcatctgactcctgctggcgcagtttcttttcctcctcgccgtcgcgagcacctttggagatgtactcattccattcgaatacacacaccacatatgggtcgaaacttggtcgcagtcctcgaccatcggtgatcttcaaaaataatttaccattgatcgggcccgtgggtgcgccgttggccggggatgttgatgttgcagccgcagccgcaggctcggcctcaggcgcaatttcagactgggactggggtgggaatgcttcatcgagtttcatagtaatctcgtccgtggagctttccatgtcttccgactttgactcagactgtggggtctcttgcgaggtctttttcggggcggaagtggcggtcttttcctgggcggttgggagctcgttggacatggcccggggagtaagaggtggggtattcttaagacgcgacccatcgggtgcgttttcagttagcttggctaggttctcggaagatatcgagacatgcggtttctcatggtcgaggaggggagcttcagtcagggaagaggcatctggagggagggatggattgcaaaaatgggtggcaagaacggggtcgtcagagatactggatactgggagggaggtttgacggcgggaaggagggtcttctggaggagtttgtgtgggtgaaatgaggtaattcttcagcgttgtaaagatagaagacattgctggactcgtcccgaggtccatctcatccgaatcatgctgtaacaaggagtgtggaggggtgtgcagactggggtgttcctcatccatcttatcagacccatcttcccgctccatcatgacaaaagactcggatgaatcggaggagtgttgcgtgtgcgcatttgattgaagggtctcagagggtttcgacagacatgaccataaccgcggaagactcgctttatcaccggagaaagaaccaacctggaagtagttgtgcataatggaaggcagacgcttatcggccggatcgggctcgggtgttgcgattcctgtcggcgtgggggtggaatcaggcgacccaatctgatcttgggtatcgtcttctagtccggagctatgagattaaaaggtcagtcatgagaaatgccagctccgatataatctgcaattccacaggctgtaggcaaattccgacaaggtccgagacgaaaggcgaagcaccaagactttaagagaaagccagcatcctcgaaacgccatgtttcatgcaggtcaaccctaacaagaacagactgtaatgcaatgcggtgtgaggggatcgtggaccctctttttccctccttcaaccccgcctttcaaagggaatgccttgagtcaaataagagatataggaagttgactcacttcattgtcttcatgtcgtcgccgtgcaacacgggtccactctgcgcagccattgtgtttccattcaagaacgtcgaaaaatgaagaggaacaagaagtgggggtaaaattgggaagttggaaagaaaaaaaagagatgcggattttttgatgagctaagggagtttgcgggatgaatttgaacccgttcggattttccccaacaagaaaatgaaatcgggtttatttccagttttattcgatttgggaggtttggaaaagaaaggaaaaaaagatgttgatttggtagtttttggatttagaagtggaattctctgcggtaatatagaaccccactgaaagatccttaaagggttctcactgatagtccatgtttccgagtgtattatcaaggcacgtgtaagaccataagaatataagatataatcttatgggataacccagctgaatgaagctgatgctgactataaggcaaaggtttcgaaaaggactagaactaaaaaaaaaccctgcaaggacattgacgccttcttgtattctcgaataatcccgagccatccacgccttgtttcccgattcgtactatatctcaagagggaaaatgaatgagaaatgaatcagagctgatattattattagaaatcagaaatcagaaatcagaatggaatattattaggaaaactaacgtcatgtggaggcccaatttgctcaatagccctagatatcaagacctcttcgtctagtctttcccttctgattccgctttctagaatgtgaaggaaacaagattatcgcactttcaggtcacggtccctagtccgagtgacattaggctcccaagaacatgtggctacacccttttcacaagatgttgagtcttatcgcgcttcgaatctccactcacagcggggtatctcgttcattcttgcatctgatgacaacatcggagtatacgaagtagcgacagaccgctttttatattcggatggtttccgtgttctagtactagtacctatatatatgactcaaagccggtacgcttagtctatacactaccctgcttaagataaatctcttgcgattcttttgcataaaataatgaactacaattaactctgaaacccaaagatcgagaccgtgacaatctttcagctttcaatatggcccgggtctagctctcagctcctcttgcatctacatacataccaggtgaattgtgagatatgctgtggtcggcagtgggaccttatgtacggcgcgccccgatgacgcatgtggaggccttagaggatcccagtctttgcgctaacgtgtggttcggtggatttaagacccgggtcgtgcgtgaatgatgtacgtgccacataagtgagcttactgtgactgtacagtcattgtagatgaaggaaaagagaccctaaagagctatgccgatctacggttttggcccagcttatccaaagtaggatccatgctctcgaataggtggggcgaaagaggcgatcgacgcttacttccgcaacctcccttttatgtagtatgacgaatgacatactacggaaataaagatccaagacgttgattctgggatgatatctgacttcctcataccctggacttgcatgataaaagtgtgttttatttacatttaacatggtcgtacggttcatactcaaatattggacatctcgacaaccttcgtggtaatgcccggagtacagccgagacctgcatgatttcaatgtgcattctccgttatgcacaagatcgagtccgagtttggattgaatttggtcatctgcatcgggagatgatcggcgggcttgtacgccgtgcaacaaagtaagctcctctgggatatatggttttactcgagcttccagctggctgcagaaactatatttaatcagaaccaatatattttccgggggcatccttatattaaccattcggatttcccggttgccgagccgaaaatatatggcttcggtccttctatctgatttcttgcggcgtttttctttgattgctatttaaacctgctagaacgaattcagatgttatctataaacaactggtctaagagatgactcgataccgtgattaaaagcatgttactttcctactgacccgggatatggttcgctcaagcctcttacgggttcgagtcaggagctatctctcacatgtgatattggagattgactgcaaatagaggcatagatgaggtcagtggttacacaagcaattaacctatgcattatgcgtttcgatgcagtcgtctctttgttggatggatgcaataattgacacccaataatgggaatgtgattcgggagagaacggtgcactatcccaccggtgaatacttacgggattctcccaacatgtagatctatagttagatggactcatcttgagcattgaatccccgcactcccataccggccaaggggtaacacaaagcctatgatatcagtttaatatgagcattttgagacggcaatggcggttgggggtctagaattggaaaagaacggatatcgaaaaacagcaggatgttcgcccgatcaacgaccagcccgaaatgctccgttggagtaggaaaaagcatatgacgtcatggaagatgatacgcggtttgccttgtttgcaatatctatatgcacctctttcctgtttcggccgccgccgcttttatgagtagatatcagcactggctcaaactcctttttttcaaggttcctcttcattccagggacgggagttgggtagtcatggtatttttttcagttattgtgattatgatggttactgtggtcttgagaatggtaaaaagtaatctgcccattttgtataaacttgggggtaatggatggtatacaagtttccgcaagacaagaagtcaaataggcaaagaaactgcggacatgaggtaaagctataaaccaattcagcaaatgaataatagatatatgctggcgttcgccgtattgatcaacttgaacgtgcacaggatgacacaaatgtgcccacaacgagatcgctgtacggaacctatcgtcttcttggctcaccattttctgcatcagttcgccgccttcttcatgatggctcacatgattttcaaagggggaaacgaacatttcgtggatgtcactggcagtaaccaaaggctttttgatgacattgcccatactgccaagcgggagagaaaatgctgtattaggaatagtcgtagggctaggccaggtcttcttgatgataattcccctaattccaatggggaaagcaatagagctgtgaatcatctttgtggtgacccgagccttttgagtgttgcccacgatctcaagtgaggcagaagagcaagtgggaaatcggcttggtggtgatagctccttggatgatgttgactcgatcttgagcttggaaggtgttggcatctttcggttcgaattggataaagaactccagcgaccggggaaaacacgtaaccggggtcaatcgggcgtccaactagtgatggtatgttgggtagagggggatcgcatcggtgctgtgattataggggaaattgaaaatgcctgctgcttcccatacgtcaacctacaaaaacttattagcctaatttcatagattgaaggggaatcgcaccacctgggagccctctcgcgcaacggcctggcatatttggcgttgcaaagtattgcatgcccaacacttctccccagcaagccgcttgaactaggagcaggtaccgtattgccaaatcatactgtagtggagggaacccgttctcaacaacggtcaggtgatacaagtcttagattttaggtaccgctgttttgtagttaactagtagttaactagttagttatgtaacattcagaatagcactgataacctagaatctagttatacattcctctcatctcacgaattcgtatattacgttcgcccctttgaccattgcatgtgttgtttcaatccgcatacaccatatacattgcgagcaaaagcggcggaggtgagcactagaacggaaggggagtgctaagcattgccagatgtttgccgcgtttgcagcttgtaatgtacccggaaaaacttcggcccttcgcaaaacagctattcctccccatctgcgcttccccagcatatcgaccaaccatcgacaaaatgccacgaaagctaagggcggctgcccaggcggctgcacagtcgataagtgagttgatctgaatctcacgttggcccacacctgccacaaacatccgtcccttcgactatgctttgaatttcatcctctccttaagacgcgtttgcgactaaccacattcagaaaatgtaccttcaattccagatgggtccgatgaggagatggccgacgcgatttcctctcagccctcctcgcccgtagtcgaaccagaagactcccccgaagatcccgatgtcgaacccgaggctgaaccagaacctaaacgtgaaccagaacctgaacctgaagccgaaagcgcagaggttcaggcttccgaaactcctgccacacctaagcctgccacacccaagccagaggaagaactgagtgctgcgactcccgcagaagactcaattcttgccgacactgacaacacaccttcctacggacctggccgcccatcacttccgcctcgcggcaagcgtcgcattggtcgcccacccaagaaccctcggcctgaatgggatccggctaacggagatccaccattgcgagttactactccagtcaagagacgccgtggtcggcctgctgctagcgggggacgctgggcacgcaaccgcggcccctctcacctcacccaggtgcctgtcgacaaggaaggaaacatgatggacgtaatcaacgacgaagtatcgattccacctgacccaattggcgctactaaagtcgatgagaatggccacctacaaggcggacgcgagtatcgagttcgtacctttaagatccttggccgcggagaccgactctacatgttgtcgactgaaccggcccgctgcattggcttccgtgactcgtacttgttcttccagaagcacaaaatgctgtacaagattattattgatgatgacgccaaacgtgatttgattgaacgcgatctcatccctcactcttacaagggacgagccattggtgttgtcaccgcgcgctcagtgtttcgcgagttcggcgcaaaaattatcgttggtggtaagaagatcaccgacgactacgacgaagctgctgctcgcgagcgcggtgatgtggagggcgagttggtcgttccggaagaccggctgcccggacctggagaaacttacaacagaaatcagtacgttgcctggcacggcgcaagcagtgtttatcacacaaatgcgcccgcggtcccgcttgttggtggaaagccagttgataccaagaaacgccgtgtgccagtgactgatgataactggatgctcgagcatgcccgggctgcaaggtgagttgatgtttgataccgagccacacgttgggccgtggactaatacatagtatagtaactttaactccaagctcgccgaaatgcgccgtgccaatctgggtggtgtgtacgatgtgcacaccaatattatgcagcatccgaaaatcatgcagccaacccacgcccgctgggagcgcgtttccccggctccaacttctgtcccgaccgaattgacgacgaacatgaactcattgaacatctcaaacgaagcttcttcttccggccacgaaaagcagacgccccacgaaacccaggaatcgcgcgaggccaccacgggcgaaacttctaccgaaagccctgccactaccttttcccccgttcccacccatctccatgaccactacgtcatccaggatatcgtctacgaatccccgccatactcaaacatgggcatcccgggccctgatggtgatgtgcaagatattggccccaacggcctagtcagcgtcgccaaccccaagcatcccgaattcatgagtccagagatcctccagttgcttccgtcggagtgcaaggaagcgctcattgatgctgcaacacaggaggttgaatggaagaccaagtggaccaccgagaccatgaacggcgagcgtgctcagccaaccaagagctacgcctggtacccgtaaaccctgtgcttgatttttcttttttcttggggttcttgcgagtcggcgaaatttatgggttatcatgggctggatggatggttggacatggcaggcgaaagccgctggagttattttctttctttctgcttccgagtctgctttcgctttctcaagatatgcctaggatagatatttgaccatgatgtattgactggtttttattccttttcggtcttcgaatgcatgtcgggtctacatgactgaacttggcttcgaatgatagccttctagataataacgaaccacatttttttttctacgatgacatgatgctggcctgctagcctttctgggaccttcgtcataaatacgttctctctctggtagcccttcgtccgtatcttctgactgtatgtagtagtacatggactaatgatttacaactaaatttatgatgcatatccaaagctgagagtttaaaattaataacttagcttacaagaataaataaaacaaagaaaaccgaggtcatctaaaactccaattgaaaaaaaaagcaaaataaacatgaacccaagagatcgagggagtcggcttgagaaagggtgttgaggagtggaacagccagataaaaaaaaatgacagaagacaagacaagacagatcggcacagacctcggggatacctaggtagtgtcggatcatatgtaaggagggaatggtagagaaacaagagagatagaggtaataaagaagagttaccggtacgtcagcaccgggagccacaggtggaaaaaggctgatagaacggctgggtcatgcatgcgagagcaaaggaacaaggaagagcaaagacgaggctgcattggtcgcgtggtaggaagtaagggaccgtcacatggccatttccgcgcgcaactttgccagctcggcctcttcgtcttcttcctcttgtgccttggcggggtgcttgactatagacaagtcgtcagtgagcgagcgatacatgtgataccggtgtatatggttccgttccaacttacgatctgtattccccgcagctggtagccggtccagttgactgcccacaggtacggtcccggtgtgaagcattttcgcgtccatcgcttcctgctccagaccctccaactcggcatcgagctcttcctcgtccgcctgctcgccgatagagaaactggtaatgacgcttccgatctcggcgctgagggcatgctgctcttggaggccctccctgcgagttattagtaagatggtaatacaagaatcgcgacagggcgatatgatagataagggtaaaggtattcagtgagcccgccatcaacgtacatcgtagtgtcgacatcctcgagcttcattccaccatgaatctgcttcatagcggcacctgcctgcttcatagcagccaaggtctcgtggttgatattcgcggcttcgatggagtatatctgctgctcgagttgcatactctgagctgttgtctgctcgagagtcttctcgtggatctttttccgtcggagggcatttttagcggctattgaacacaaagtaaaaagagcaatagttagccaaaactgcaaccttcaaatagatgcctagcgacaatctgcaagatccgcagtcataccattcttatctgtgttgacgttcttccgcgctatagcctcctgttctgagatctggctctcgagatgcctctcacgtttctgcagcatatcgagctgcctgcgcaaatttagaatagcctccttgggcatatctttccgcttctgggcggcggccccgccaaaccaagaccacatggtgatgtcggtgactgtgtaactgggaaaccgaatggaaaaagtaagcaggatagaatccggtggtcaggtaatagctaggtaatatgtccaaggagaccagtggccgaaaatctggagtgagtggggagagaagagtagattggttgttttctttgctgcgagtcaggtggagcgataggctctaggcagagccagggagccgacagacgaagtaagaaaagggcgtaaaatgacctccgaatgagcagggaatctgaagcacacgactcgtcgagagcgcttccaaggataatctctggatgaatgcaaagtgtggaggggaaggagcccgactttcccctcgctgaggctagttatgacatacacggtaaggttagtcacgtgcgccaacaagaaccgctctatagcgcggaagaagaacgtcatgtttgtggccttttgatctgtctcttattcttttctttcaatattcacacttttataatgttgagcatcttcttcaactagcgcagagatgaatgggccgcgcccctcgactcgcgtgttcctctccgatctctcgtctctacaggcggactcgaaggtccgctttcttggctggtgcgtcaggcccagagcgaagaagaaattgtataaagttgaggctttccaatactaacgatgatctacgttcttgtgtacacatagtgtgttatattataacatcaaaactggccatttgatactggaacacaactatccacgcagcaagatagctccaagctctgtatctgtcgacatcaatcctctcctcgaggacctgaccgccgaggaattgggcgtagggacatggctgaatatcgtgggctatgtcagagagtcggagccgctgccgccaccatcttcattctcctcggacgcgaaccagccgagccagaggccttctacgtgcccccctcgtccggtgtatgtcgaggcaatcatggtatttccggccggagctattgccatcggggagtatgagcgaatcctttgcaattctcagcatgttgagcggatgatacagttcaacaactaagaaaacgaaaacatccgtagtggctgaaaagatgacatggaactaaagccaatcacgcattaatggagcgtctctgcattagatattttgctatgtaatcacttttcgagcacctcatatacaaggcgaggggtatcaagacgtaaatcaaaacaccaggccaaaaggcctcagaaggcaacctaaaccgcctcttccactttcttctcatctgaaagatgcacctgctgaagctgaacctgcctcctagcccgcttcccctccagcttcatcttctcctcctgcatgcgcagaataaggggactcttcatacgaatcttatgcccatacttatagaacacaaacggaatcggcacgatcacgacctccaacaaccccaacagagtgcccgcccaattcggccccagactggcgtacatagaagatccagcaagaggcagaacaccaccgaggatactccgaataaccgagttacccgctaaagcagaagcagcatacatgccgtaactgtgagtcaggtagttggacgaatagatgaaaacaccggtgtttccagcgccgaacggaatacccgcgagcaggggcacaatccagggtatggaggctggggagcaggtccatgcaaaccagagctcgccgactgggatcaacgctgcgcagatgcagacgaacgagaccattgcctcggggtgtaattttccggtctcggggtctttggcgtggctattgattagtcgccggattaagggttcgcaggcgattgtgaggacgacgccgatcccgatgcctaggaaggcgagcccagaaatgcccagttcccacccgcgaatgtctcggaagacgattgggtaggctacgaagcagaggtacaggatgccgtagatgattgcgatgtagatgttccagaagatgctgagcgtgttagaacatgcgatgtgggttgctgctgggtatgtaagtgtaagaaactcaccagattggttcggtgactgccattacaaatggccggctgaggttcagtttgaggatttcagcaaggctcgccttttggtcgtatcgactccaccagcgggaatcgccgctctccttgcgcattctggctgctttcttttggagaatggttggtgcatatgtttccttgaggatgatagcaaagaccaaagcaatagcggagagcatgagcgcgatccagcacatccagcgccagccaagatattcagtgacgaagcctccgataacaggaccaatgactacatcctgttagagatggactcgttatatcagaaaagagaataagggaagaacaaacctggtccgttgagtggcccaatactccaaacagagattgccagagcacggtgctcatcatccaccaaatcagccaccataccgggcgcggtagagatcatgacactgccgaagaaagcagcgatgaagcgaatgacgatcagtgccgtgacggacttggcgagtgcgcaggggatgatcaggactgtgaacacggcaagacaaattacacagacaggtttccgtccgtagacttcgctcaacggggccatgaacatggacccgatggcaagaccgaacagatagaaggtcaagccaagggtgacgataatcctggattggccgaattcctccgccattaatgtgatacctgatgtataagaagttgaatataacacgcttccgagtttgttagctaaggaatctcgcgcttccgaacttcaagatagaaacttacacgatgagagtattccatgatagaaacacgatgcccatggacttatacttgaagttccaattcttggggttctcagggtcatcattgccatcccagtcgacttcatagtcggggtcagcggtggcattggttgcgattgtcgttacacgctccgacagtgacatatgcgaggtccgcgaggcacgagctgtcaatgtctttcctagcgcatcgcgctcgatctgtgcgtctatcgtggaaattgactcgatagagtctgtgtcttgggacatcctctcagtgtgttcgggccatttatcttggccctccaaattgaagtcctttgttgccattccctggacgaagggctttcaaaccaatgaaacagtaccgggagcttgggtgtgtaccggagatcaaatggcaagttactccaatattaagggtcgcagttgatagaataggagaaataagagcaaagaatccctctattttcgatttcagccccgaaataaggttgtagaagtagagtgtgtcgctctctccttttttttatatagagatgtggtggaaaagctgcaaatcctgaaaccgaggttgctttatcaacagcaagcctccaaactgacacagattgtgacagaagatagccctggagaaattgaaggcatttatcatcaaaacacttggaaggtggggctgaaagtcattgataagcatattcaaagagaatttgctaggctcgtagggcgtacatggcttgcaggatttgcgatatgccgagaagatgatctatagcccagaaaaaaaaggggaggatacttacttttcctagtaccaaattgtatataactatagggtaacagagcatcagatttcccttatatccctataccccctatactactccgtgcctggactatgtcctacaagcccttggcatggatttccccatgggcaaagcgatttgccatggcgtgatatctccgcaaagacagaacttgtgtgttccgacccaatttgtctccacacggcctattaggctcgaaagagtgcaccatgtgggttctagcctgggctgtagcgtgccggtttgccgaatactgcctgtgagagctgtgcaatatatactgagggtgtatttctcatggcataataataataatcattccatgtatactacttcgaccttgaagtataaagtagatatcaattttggtccagatcaaagtgggctcgcgtggaaccgggaaaaagcgggttgtgaagagaatgaaacatgaatgaaacaagaatagaaacttctatttcgatcccaactggttatagtcacttttatgtatgtacctatacgtaccggatattccctggcgggtggggctttcctatttgagctgccgccgcttttatgagggtgctcaggctcaggctcactgagtagatgtcagaacgggctcagatcagtgatcatgctcagatcagtcacgtgcaggatgactgatgctcagtgagtgctcagtgagtgctcattggatgctctctgattactcagtgatgctcagtgtccaatcagtgagcaacactgatgcacatggggatttcctatttgagctgccgccgcttttgtgagggtgcttaggctcaggctcactgagtagatatcagcacgggctcagatcagtgatcatgctcagatcagtcacgtgcaggatgactgatgctcagtgagtgctcagtgagtgctcattggatgctctctgattactcagtgatgctcagtgtccaatcagtgagcaacactgatgcactcagcccacctcagaccttacccagaagggattagcccccacagggtcgtttatactgtgatagttagttcgttgaaagcattgttgctgccctcattttccggagcactacacctcatcaagaaaatacattatgacgaaggggcgcaggaaagagcggagaactccattcgtttcatgatgtcttccttctgtcttctaattcagagcggctcgagctcaaagtcccaaatataaaggcagaccgtgtgccagcattagcatgtaataaccaacacgccttctattcaagcgccttttacttggtacattaatctaatatcgcattattttactttgaatacatctcctacctccaggttgcaccgcacttgattatgggcagaaaagtcttttttgccaagcgcgatggaatcgctaaggagaggcgccgtctacagcgagaaaagaatggttatgctcctggggtccatagagaggaggactcaattcgagagaaagacaaaaggcttcccaagaccaacaaattacatcaagaaactatgaacctctggctcgagtgagttaagccgcatctgaagtggcaatccctttcctattatgaattctgctgatcttcctttagtttcactgcaaacccggagaatgggtttgaatccacctcagactatacccggaagggattagcccccacagggtcgtttatactgtgatagttagttcgttgatagcattgctactgccctcattttccgaagcactgcacctcatcaagaaaatacattatgacgaaggggcgcaggaaagagcggagaactccattcgtttcatgatgtcttccttctgtcttctaattcagagcggctcgagctcaaagtcccaaatataaaggcagaccgtgtgccagcattagcatgtaataaccaacacgccttctattcaagcgccttttacttggtacattaatctaatatcgcattattttactttgaatacatctcctacctccaggttgcaccgcacttgattatgggcagaaaagtcttttttgccaagcgcgatggaatcgctaaggagaggcgccgtctacagcgagaaaagaatggttatgctcctggggtccatagagaggaggactcaattcgagagaaagacaaaaggcttcccaagaccaacaaattacatcaagaaactatgaacctctggctcgagtgagttaagccgcatctgaggtggcaatccctttcctattataaattctgctgaccttcctttagtttcactgcaaacccggagaatgggtttgaatattaccaaacctcccttggttctccggctccaactcatgagatgatcaaggcgtacattcgctggtacgcaagttctactcaagggcgactgaacgatgatgggctacctacggtaagaaccgtgagtgcgcatgccgaacagttctttggtggatttgaacaattcacaaaaattaaaatcatcccagacgatcgaaaggaaataaaaatggttggtttattcgtaacttcctccctgagaccatcataaactaacatcgatgcagtggatcaaaaaaaccttgacggcagatggcgtcgttgtagatcaaaagaaagagaaacttaacttcacaaggcatgattttttgagagtagtctcgtctttgtggcagactgatcaccaaacgttcattccgggactgctcaaagttgtcatcttgtttgctctccagctgttcctctttactggagcaagagtcggagctttcataccctctagtgaggacaaacatgaaagaggtcttcgatacgaagtaaggcgtctttactccaccgatattatacaacattaatctctatcctagcatatcaagctggttctgtttccttcatccacagctcgttggacggtgggttggaaggtggatcagaaatggctcaaaaatcgtcgatgtgaaaaatacacagtgtgagttagaaggacctagtgttatatttgtcaaacatacggggacttcattaactagtgcctctagattcggaattggtatccgggacagcaacaggccgcaatttgcgtcaggctaccttcttttctctcttgcattagcgcacggtgctatttatggggtggataccgtggatgatctagcgcagtttgatctttcaaatggcgagattcatttgcgatggaaagaagagtacttggataaaccagttctcaggcatgccacggctgatgggcctcaggagacacctttgacgaaacaaaaattttgttcttgcctgcgtcagatttttaatgctgcagggtactttggtgaattggcaactatccattgtatacgacgaggccttgggaaaaaaatcgaaagtaagcccctgaaaccacacaaaacaatcgatagacactcgagagagctcttcatactaagttctttacagagagaaatggctctgcacctgtcagtcaaattatggggcatcggggcccaggcacctttccggagcattatcaagcccactgttcctccatagatgtagtgggagccgttctagatgaggaagaccaatccgatcatatcgagtactttcaaggttatgttcaatattacgaacgtggcttgccaggcgagttgccagcagagatcaaaaggagtattttggaaaaaccagatatggtggaaatgagagcccagatcgaatcattcgcgcagaaccacgacgaggattccctcaagaacatgaatttggaatacaggaaggcgctcgttcggcatcgcctgttcgaactcaagcaatatcaaaatcggtgggtacaggagaaaagagaccagaaaattatcaaccgaggaaaagaagagccgactcatttggaaaatgacattcgcacacgtgctcaaatgttgattatgcccgaggttgcgcgaatcgcaacagccatgtcctgcaccaaagagctttcctttgacgaaaaacttcttcttgttcaagatctacagacgcagtgtgcccgtgattttgatgtggtatacctcccaaatcaaagtccggttcatgggctttgtcctgcaaaagggtgccatatcagcattgcaaggtgagtgcctaggctgaataatgacatggccaatactaactccgctagtctgaggaagtgtgatagaagtgcccacattcacggatgtgttcggcgtgagaaagcttctgaccttcaaatatcagaatcagagatgcggttttgctatgaatgcatggaatggtttttgtcgagtcaatggcggaagcattgcgatgcccatctccagtcatggcaaatccagcactgcgaagtgatcatctatcgccataccgtcattcgcccgggctattgccccttttgcttgtgggacctgaacctgaatctctccgcagaaacccgtttgcgatcctggctgcgaagtgacaacctgagggaacacattgaagggcagcacatggctgaaattcagcgtttcaagaaaaagccgatatgcggatgctctcaaatctttaacaatgagcgtgaccttcgaaatcacttacacgatgcgcatgggctaaaggaaaccatatggcaagaaaatccaaagctacccaacaaaaggaagcgcacttgcaaggtggagtcacaatgctcttcaacagaaccaggagaggagcatcccaagaaaatcagatttcatcattacacacctccgtgccatgagcgtgagcacgtgccagaagaatcatttgtccccgtcccggccttgcttccgtctgtcgaagagaatctggaacaatactcggggccaagtatgtgtgacaaatatagcacgagcagcagaagcaactcagtagaactatgcttcttggaggcaagtcccccacccagctcggggccaacaactccaggtcttgaggtcattgatcctcgaatcctcgaacctcctaaattcaacagcgacaatgcccgtcaatcttgtgacccagttgtcatccagccaaattccctcactttcccaccagaagaggatgaggccaccaaaatttccgtcagtggcataacacagccgcaacctcccgctctaagctttgccagtcagccttctggatactatgctgtcactgaagccaatgagaggaaaggactgcaatgtctcacctctttgtcaacctgtgaccaacctgttactgcggaatttgagtgggagagtcatccacttacacggagagaaggcggcgagggaaacctgtctgttgatgatcaagcccctcccggtggccctcgcagaaccctcactagatccaaggcacaaactcagtcgccccagcatcattcagatagtttgaacagctgcaagccccggcagaggcttaatgcaaagaacaaacgaaagttgcgtgacctacagagacagaatctgaccctgagacagatcgggcctcatttcgcggatattgatatggcgttactgcgacaggcttggatggaattgaagccttctcagagatgcaccagatctcgggccaattgaaagggcaactgaatcatattttcaatcaatagtatttcacttgtgcttggttattatcagtctgtacaaaatttgctattcagccgcgtagtccaaccctcgccgacctaactagactccttgtcacaccatctgaaagttcctagctgtgcgagaataagggatcagttagaaataaatgactcaaattccggcaggatcgcgggctcgttctttaaagagtaaacgcgatgtacgttaaactcgaggggcaaacaccctacactttcagcgcacaagttcgaagcatgatgagcttcctttttaggtgggcccgcggatagccctttaaatgatagtcgagttcttatttctagtcgtatttgattgggcctatccggaaaataactgcagtgggcaacatgtaacagaccgtgaagactagcaatgcaagcaacttggtggctgttctggcgaaagcccaatacagccagcttgttacatggaaacagacagttacattacagttacataatctgcaccgccacagacgaacaagaaaacttagtaagtaattattgagtgtaatgtaacgtaccatgtatgttttaccttgtattatattacagctgctaagtattcaatttctagttatagttggcctgtggacaaaattgatataaaaaagcgtgggaccgatctacgagttcaacatgattacgtagaaacttgctcgtcccaggtgagtaacatgcgctcctaagaacctattggcatccagaaactctctgagtactcctagagaccagcttcctgccccaggagcgccgcatcgttcccaggaaccaccgagtctcccgggagcctgatacaagctcctagggcccaattctaagttcccgggagctcaggggctcctgggactacccgtgccgttcctgggagcattcattcggttcctaggagcttgtatcaggctcccaggagactcggtggttcctgggagggacaatgtcgtctgggaatgactagcgacaaataaagagcagaaaacagacttattgaactctaagccattttcttgtcatgacgttggaacctacaacacagagctaatctagcaagcaccgtagctggcaatccgggcatagggtcagttgaagtcccctttgttcttgcacgaattctagggatacagggtcaagggatttattggtggacaatcacaagctttctatcgtcgcacactgaaattgcaacattgtgttgatacaaaactctgaaacgactttgatttaggtaatagatcgcctccatctgtttacagtctgtttcttgcgggctcaggcaaagtaatgcactgcctgcctttcacataatcccgtttcagaacggtcgccgcaacaaaatgatccttcgcatgccctaatccacaggattgggcattctagccccaatggatgtagtaccttgttcacctggccatcaattatggcgtcattgatattctccggaaacctcttctttcttcctgttcagagcctcgctggtgaggacctcgaaagctggtaaacccgaatacctagagtgcgaatggtgaccgggcaaagtttgtgacttcaacagtaaatctttaactgttccttccttctggttgtttggggtggtgctgtctctcttttgccagttggtactcgagttccctattcttgagctctaggttgcaagctttttgttgagctatcttgatatattcaataaaacactggttctgcttctccaagccggctttgtccactgcgtgggcccgtaacatgttgtcacagttttgtagcataacggttgcctcgtagtatttttgttgcatttttgacatttcagaatatatactcgtaatgattccctcgagcctttgatttggatgttgcatgcctgagacaagttaattcggaactttcatggtacttcaatcccagactgaccttgataaacgattggtaagggggatgggctcgggcggtccgacgccacacgtcttctatgtggaggcatttttgatcggttttggcttttcggacgatttaccacttcttgtaggagaaataagataattgtcagatacagtttttcaaaggccaatggcctctatttaaaatatttttagagggcttatgcattgctgacgttcccgcggtgtaaacgtcggcctcatcggtataagatcgtctactttggatgtcaagccacaagcttctgggatcgtattgcttgctcttgggctgtgagggtctcacgtatacgtgaatgaggacagcgtcttccggatgaataatcaatatcaaggaaatctatagtcgactctagattaaagacgtagcgcgaggaagcttccgcgtggaggggactccatatgcaccatgtgggtccagcagatcatatctcaatttagcttgtatgttatatgtataaccctggaaatacgatgcataactcccaggaataggtgcgtgcttcctgggaacactataacatatcccgggatccttggggctcctaggaaccagccgcagaatcccaggagtaagtatcacgatcctagaagccggtgactcgacatccacttttaaatatatccgtatccatgatatgccctccaaaaatatttaaatagaagtcactgcctcaaagaaatgcgtcttcaaagctcctcagccaactactgggggtgacagacttctctctgaattattactcttagccatccttttattaccatctgtataggtagtcgttacctatacgttcacaaaatctgccaagatgccgcttttgggacttccactagaattacttttgtggattggcacgtccatcgacaagaaggaccttcgaagtctgcgtctcacatctcgagaatccaacgttgtcttcacaaaaagcctctttgattgcatagacttccaagacaccccgccaattcattgggcaatcgagcatagaaacttaggcatcatccagcactctctgggttgggaaaaggcagatatcaaccaaccgttttctggccttacaccgctcatgttggctacaaaattgcggtacgcagacgctgttaatttgctcttaagccatcattcggtgaaagtcatacagcgtaatactttgggagaaagtgccttctcgatcgctgttctgcatggaagcgtgaaaattgtcgaacgactcctcaatgtgcagaacattgatctcaataaccaatccctggacggaaatgcgcccatttcaattgcgctgacctgtcaccaaacctacatcttccaacttctcttgtctgatgagcggacaaatgtcaacatctgcgaccatcatggccaaacaccactgcacctagcgacagaaattggcgattatggagcaatccaaatgcttgtacgaaatccgcgagttgatgtcaactgtttcaaccaccgacaggaaactccgttgcttctggctgtcaaaggacacggtcgttttctccccatcaacaaaagactactcatcgttgaagccttgcttttaagttcatgcatcaaccttaattatcaagatgagaatggacgtaccgcaatctggtatgcagtgaacaattccgacataaaactggctgagctcctcttgcagcaaacaaatctggacctcaattgcaccgacaagctgggtcagacacctttggcaaaggctgctgcaaatggctccttagacttgatcaaagtcctcttccgtcagccggggcttcataaaagccctcaatctgccgatgcatttccgccgctctggtcagcatgtcgcgcaggacaattttcaatggtggaatttcttttacaaagttcagccgacattaaccaaaaaagtccatcggggacgtcgccacttcaggtcgcaataatcatggagcacgtcgacattgtccatctccttctcagctacggagaatctttgttgatcaatgaccaaggccctagctcctttactgcgctcatgtttgcgtcagctcacggtaggtttgaaattgccgaaatattattggagcatcccaacataaatgtaaatgcggtggacgaccaggggagaacatctttctggtggggtgcggctggtgggcatttagtggttgtgcatttgttggccaatcagcgtggtgtgaaaaagcgactgaaagattcaaatggccagacggcgtatgccatcgccaaggaacgcaagcatgggcatgtcaaggtttatttgcgaggcttctagggttcagctagtttatagaaagagatttcaattgatgtgttcacggcgatcgggttctctgagtgcaatacggtattgtaacagcagtcttttcaccgcggcctgttgtctactgctcatcttctctagtgatcgataccaaggacagatctgacgagcccatctctagtctagagattagcagtgcgacgggcttgtgctaatgctaactaaactggaaggaaggactgatctccatctgacgacatataatattagctagcttacgttgacaggaagtacacaatcaagtgattgaattaatcagacgcacagggttagcgggatacgacggtccgccacctgcttctgcgtcgaggatacgatcgttctctcggcgccatcgaatgtaaaatcatctctacaaccaagcaatacccatatctaaaatttgccaatggacaatgagatctaaacaccatcgaccgatggatgaacggccttgatcgaagccatgagtcagtcaacaacttaactcggttctcattcggggatgcagaagatgttattgtaagctgtcttcttgaagttcattggaaaaaggttaccgaagacttctgttgcaagaacgctctgcctgtatttgatggcctttcgctcacctgcacgtggccaagaatggcgaaattccgcacgaccagagcttcctctttggacgaccagttttgaccacactcattcccagattcctaaagcacaaccgccgcagactcttccccactccgatagcacaaccttaaagtacacgagtcttgattccggttcagcttatgaaccgccatcatctccaccggattctccaaaggcagtggctcaccgagtgcctacaagatctcagaccagctgtgcaccctcggctgtacagcgtcgctcgcagtcgccagactcatcaggctccaattcgaaccaagcaattggccacaaacgggcttcaaccaagttacatcctccccatcttcccaacgagcaggtcatcaacgggacgcgggaaataatcaaggcaaccaggcccggtatcacgatgcgcaattttgcacccaacgatgtttactcggattgcagtctggcagtgtgttagatgactgctgtccaaatgtgatgctccatcatcgaagcaaagacaatccccagcatccgattacctaaaaagatttggtccgtttacttaatgcgcaactggacgaaaacattgaccgatgcacacatcttggcggttgtggggcatactccgtttgaacttgcttgtgttgaatatggctacactgttattggaaaaggaaccacatcggggctgtggaaagaagtctcccgcgaggcgcaggtataccaaattctgcggaaggcccagtctgcaaatatagataaaagccgcaacaaacctgtacacacacacacacacacaattcattaacgcccggcggctgagccgaaagggcaactatcactaatctaccagtacatgcatatttgaacatttgccgtgtctccttggagcccatgcggtatttcctgccgtctttgacattacagtttccaatctcataactggtccctgtgggttagtattgattagtagactggcttgaaggcgcttcttcaagtgttcaacatcctatcctcggcagttgaagcgcgtccaccgttctcacaaggtgttggggttagtaggggtaaagtattctatctgcgttcgtcggcataattaggtggccccgagtcggcccgtagcgatggcaaaccgtattgaggctcgcactgcttccaaattcggcgtccacttttgaccatcggagggcgacttcccacccaagaagaaggacatgttacttcggcgagtgtgggtacattgcagcatttctgtccggtgcgcggtccacttccgacatcgaaagagaaagtggtccacggtctctcttgcttgtccacatgcacattgatctgtctcggcagcattgattcgaaagagatatccattgagtcttgccatgccagtccggagctgggccaacacgctcgcttctttccacgataatcggtcatacagctgtcgcgtgtgtttccctggaagtgcggtatccactcggctggaatgtcttcctatgtcctcaggtagcttcctgctggggattgcttgggcacgcgcaatcttcagagtcgtcgatttcattttggggacctgtacttgcgagatagcattttcttgcgtcgcggctctcgcgtgctctttcgccatccctagtagtttgttgtcttcgctagtggggacccaccggacgctgatctgatttccatgcctctgcaatctgctcatcagcttgtagctttggcagacgaattcctgacccgactgttgtcgcgggttcttcaacgtaagagccgccgctttgttgctcgtgatcagtgtgatcctaaagtctttcaaccccacgagtgtcttcagtgtatgcgccactgccgccagctccgcggaaaatggattttgctctgttctcgcgctcaacgtgacggacaaggtcttcagtctcactttgcgatagcgtggtgcagatataatattgcattggtatactaagatctagtctgttctttaagccaatacaacggagagatgggcaaattcccccccatgctttcccagctccttatccagctcactagtactctcattcctagatgtccgcagatcctcttgccttcaagatcttagcctttggggttccagcagagccaaaaaccttcccccacactcatatacccgtttgctccttaagcccaccctccaggccaagttgcagctctgctaagtccccttagggtcacggcataacaaccttcctgcttcttgtgaaccgacatgcgcatccgtcctctcgggctatactgacagtgttgtaaggatctctagtcggcagccgatggcgacgcgccaaccttcttcctagccatcgttgccatagtatacctcagtccacaagttggcgtgatttcttgcttcctgatacctagtatcctctcgttctctaggccgaccatgtcttgcagatggtccctttatacacccaagcctgcagcgtataatctttccatccactaaccagagtatcctccgattcgaggtaagggagccagcagccgatggcgatacaccttagccctaatcccacaaatccaattctaccccacaggtgtcctgctcgacttcgatccgcgcctctgagaggctctgtgaactccccttggggtgacggcatgagaggctgtaaccgttatcgtcggatggtttttaaatcgttcctatgtgccaaaggggcctcgaggtcgctagaattgcggtggaggcaggccgcaacatcgcggactcgtttcctctggtcgtcattgcgtctctcattggctctggagtaacagagactccaggttcgtagcccacgcctcgtacaggctgagaaatccgatttcgtgggcccaaacctgtacacttccccactcacgtccttatttattctaaaccgactgttcttaaccgactgtgcttgaccgtttgtgcttgaccgtttgtgcttgaccgtttgtgcttgaccgtttgttcttgattgtttgttctttatttttattcaccaacaattgctggctgtttaacaactatctgccgtcaaccgttcaatttttaggtttagttataaaggtgttatttgagaacatctatgtcagaaaatttgcttgaccgcaacctggccgagtcagtggtaaccgcagccccacaaagcaattcgcgataataaagttcgtgttaagcagctgtagcagtgcaacaaacaaacaaacaaacaattcattaacgcccggcggctgaaccgaaagggcaactatcgctgatctactgtacatgtccatctgtacatgctgtgtctcctgaaagcccatacacaaaaccttatcacatatgacattttcaaaaagccgtgtcgcagcgagtttctcgtgagttagtaagtgggtgagtagactggcttgaaggcgcttcttcaagtgttcaacatcctatcttcggcagttgaagcgcgtctaccgtgtgtggcacgaggtggtgggtgagcagggtcggaagaaggggtgggggttatgttcgtcgatatgttcaggtggcctcgaggcggcccgttgcaatggcgaaacgtatggaggcccgtactgcctctaggtttggtgtccagttctgatcgtcagaaggctgttttccccccaaggcgagggatatgtttcctcggtgagcctgggtgcattgtaacagttccgtccggtgtgcagtccacttccgacaacggaagaggaagtgctccacggtctctcttgcttgtccgcaatcgcattgatccgtctctgctacattgatttgattgaggtatccattaagtctagccatgccggtccggagttgggccagtacggtcgcttctttccacgtcaggcgatcatacaacagccgggtgtgtttgcctggcagtgcggcatctactcgtttcgcgtgtcttcctatgttctctggtagctcactgtaggggactgcttgggaccgtgcgatattcaatgtggtcgacttcatccgcgggacgtgttcctgtgggagagcgtcttcttgtgttgcagttctggcttgttctttagccagacttgacagcttgttgtcttcgctggtgcggatccagtggattttgattcggtttccattcctccgcaaccttctaatcaacttgtagatctgacaaactagctcctggccagactgtcgtcgggggtttcttagcgtgagtaccgccgccttgttgcttgtgagcaacgtaattttgtagtctttgattcccactaccatcttcaatgcatgtgccatcgctgctagctccgcagagaacggattttgctctgctcttacacccaatgtgacggagagggtcttcagtttcagttttcgataccgaggtggttgtttctcgatcgccacaccgaatccgaccagctcgttccgagccgagctgctgaccgcgatctgcatatacaggcctgctctggtctggatttcctgtggttggtccatatcaggttgtatgcgttcttcccacggagctaacatagatggattaattgtttccagtgtttccatgtcgatatgcttcagcgcatcggctacccggtacaacggcgagcgatggtatcttctgaacttcctgatccggtctgtacccctgcggagggggttggtttcaggcagggtatgcatgtccgtccacatcttcacggcccgtctccagaatcgttgtcgtgtggtggtacttcccgaaactggtgtcaccacctgcactcttcgtttgattccccaaccctaatgccaagatcctctataccgtattgggaatagacccgaagtatcgatattcctgttagattacctatacgaccctttacgccaagtgatacatactaagctcccaggaactgttagatccccaaattacatgcatttttataacccagcgtgcccggatctccatcaagataactttatctcctaattgagcagagggtatatgtatgccctcgggaggtctcgaggtctggccagatatccaactaaccaggcaagcgtctctttagtttggcttgtttgtaagaagttgctgctcaaataaataatagactaatacgccattgatttttatcattgaaaccgaatataaaatactgccaagaccggggatcatgaactttaataggtatagcgtgttttgaaagtggtgaaattgatttcaatccatcctgtatcaatttcgaatttcactgcacttgttagtgaaacaaacctccccgcttcccctgactgttccttccgatctctgagaacgtgagtgtagaggctataagagtctgccggccggcccctcaaaagtttaatctgagcaaccacgacccctgaattatgactgccacttcaccccttaaccccgcgaccacggcccagtgcctcttcatcaagagtgacgatatgaaaaaagcatttattcatctacccgaggagttactcttcctgattgcaagttttctagagaaagaaaaggacatcagctcgttatctcgaacttgccgaaaatgctatcttcccctcaactccttcctctatcaccacaattcgttgctaggaagttccgctttgctatgggcggcccagcgggggatggaagtaacagctcgtttctgtattcaaaatggagcccatgttgaggttactgatatccacgatcacgacagaacaccactattctgggccgcgtgcaagggctacgaggctgtggtgaaactcctacttgagaccgggcgggtcaatgctgattcaaaggactcccacagcgagacacctctgctcgcagccgctcagaacggccacgaagcggtggtgaagctcttacttgatactgggagcgttgatgttaattcaaaatgcgcctacgagacaccgctgttccgggccgcgtatcatggccacgaggcggtggtgaaactcttacttaaaactggacacgttgatttgcagccaaaggacgacccctttggttggacaccgctgtatgtcgctgcatggcatggctacgaagcggtggtgaagcttttacttgcgaccgagggtgttgacgcagattcaaaggactccaacggctggacaccgttgttgcgggctgcgcaggcgggccacgaggcggtggtggaatgtttacttgagactgaacaagttgttgtgcagccagaggaaggccccggcgattggacaccgctgtccgtcgccacgcagaatggccatgaagcggtggtggagcttttacggtggagcgagtggcgaagcttttggaatcgagcaggtcgataaatcaggaattcgtaaacaatataaacgggcttgaaactcgcattcccataaagattcatgctttaaaggggctagcttggcgccatcttggcgtgatcactggtgattgaatgtgaaaaccaacctctaccaaggaacgaaggcttccgaagtggtgccaattaggtcgacttacagattaatacagcggctaaatatccagattactctatgtaagaaacaatacacggcccactaacaaggatactccggaataactcccaatatagactagtctgtcttggcagttagggtttgagaaacaatcgaagagtgcaagtggtgacaccagtttcgggaagtactgtatcgcagcggtaccctatacactgtaccctatacagtttcgagaagtactgtattccaaggacatactcgagagatagagagaccggaccatggggatgaccacgagaagccagccatctcccacccccgaagccgcaaaccccacaatctcacccgaataccccaacgttgaggacttttctctcgccgaggatgattctcatgatgaggacgattctcacgtcgaggatgattctcacgatgaggattactttctcgtctcaatcacctacgactactccaccatcacagcccgagctcgttcgttccaaggaatagtgcttgctagggccactccgctccaactggcccagaatggcttctattaccgaccttcaggagtcagcaatgtggcatgttgttttgcctgccaatcgaccaagcatttatccaccttccaatgcaccccgttcgaggaagtgcaacaactacacgaggaagactgcatatggcagataatctcgtgcgatttgaaacaccacctcggaactcccaacaaacccccctcctcaaccaccgcattccnnnnnnnnnnnnnnnnnnnnnnnnnnnnnnnnnnnnnnnnnnnnnnnnnnnnnnnnnnnnnnnnnnnnnnnnnnnnnnnnnnnnnnnnnnnnnnnnnnnnnnnnnnnnnnnnnnnnnnnnnnnnnnnnnnnnnnnnnnnnnnnnnnnnnnnnnnnnnnnnnnnnnnnnnnnnnnnnnnnnnnnnnnnnnnnnnnnnnnnnnnnnnnnnnnnnnnnnnnnnnnnnnnnnnnnnnnnnnnnnnnnnnnnnnnnnnnnnnnnnnnnnnnnnnnnnnnnnnnnnnnnnnnnnnnnnnnnnnnnnnnnnnnnnnnnnnnnnnnnnnnnnnnnnnnnnnnnnnnnnnnnnnnnnnnnnnnnnnnnnnnnnnnnnnnnnnnnnnnnnnnnnnnnnnnnnnnnnnnnnnnnnnnnnnnnnnnnnnnnnnnnnnnnnnnnnnnnnnnnnnnnnnnnnnnnnnnnnnnnnnnnnnnnnnnnnnnnnnnnnnnnnnnnnnnnnnnnnnnnnnnnnnnnnnnnnnnnnnnnnnnnnnnnnnnnnnnnnnnnnnnnnnnnnnnnnnnnnnnnnnnnnnnnnnnnnnnnnnnnnnnnnnnnnnnnnnnnnnnnnnnnnnnnnnnnnnnnnnnnnnnnnnnnnnnnnnnnnnnnnnnnnnnnnnnnnnnnnnnnnnnnnnnnnnnnnnnnnnnnnnnnnnnnnnnnnnnnnnnnnnnnnnnnnnnnnnnnnnnnnnnnnnnnnnnnnnnnnnnnnnnnnnnnnnnnnnnnnnnnnnnnnnnnnnnnnnnnnnnnnnnnnnnnnnnnnnnnnnnnnnnnnnnnnnnnnnnnnnnnnnnnnnnnnnnnnnnnnnnnnnnnnnnnnnnnnnnnnnnnnnnnnnnnnnnnnnnnnnnnnnnnnnnnnnnnnnnnnnnnnnnnnnnnnnnnnnnnnnnnnnnnnnnnnnnnnnnnnnnnnnnnnnnnnnnnnnnnnnnnnnnnnnnnnnnnnnnnnnnnnnnnnnnnnnnnnnnnnnnnnnnnnnnnnnnnnnnnnnnnnnnnnnnnnnnnnnnnnnnnnnnnnnnnnnnnnnnnnnnnnnnnnnnnnnnnnnnnnnnnnnnnnnnnnnnnnnnnnnnnnnnnnnnnnnnnnnnnnnnnnnnnnnnnnnnnnnnnnnnnnnnnnnnnnnnnnnnnnnnnnnnnnnnnnnnnnnnnnnnnnnnnnnnnnnnnnnnnnnnnnnnnnnnnnnnnnnnnnnnnnnnnnnnnnnnnnnnnnnnnnnnnnnnnnnnnnnnnnnnnnnnnnnnnnnnnnnnnnnnnnnnnnnnnnnnnnnnnnnnnnnnnnnnnnnnnnnnnnnnnnnnnnnnnnnnnnnnnnnnnnnnnnnnnnnnnnnnnnnnnnnnnnnnnnnnnnnnnnnnnnnnnnnnnnnnnnnnnnnnnnnnnnnnnnnnnnnnnnnnnnnnnnnnnnnnnnnnnnnnnnnnnnnnnnnnnnnnnnnnnnnnnnnnnnnnnnnnnnnnnnnnnnnnnnnnnnnnnnnnnnnnnnnnnnnnnnnnnnnnnnnnnnnnnnnnnnnnnnnnnnnnnnnnnnnnnnnnnnnnnnnnnnnnnnnnnnnnnnnnnnnnnnnnnnnnnnnnnnnnnnnnnnnnnnnnnnnnnnnnnnnnnnnnnnnnnnnnnnnnnnnnnnnnnnnnnnnnnnnnnnnnnnnnnnnnnnnnnnnnnnnnnnnnnnnnnnnnnnnnnnnnnnnnnnnnnnnnnnnnnnnnnnnnnnnnnnnnnnnnnnnnnnnnnnnnnnnnnnnnnnnnnnnnnnnnnnnnnnnnnnnnnnnnnnnnnnnnnnnnnnnnnnnnnnnnnnnnnnnnnnnnnnnnnnnnnnnnnnnnnnnnnnnnnnnnnnnnnnnnnnnnnnnnnnnnnnnnnnnnnnnnnnnnnnnnnnnnnnnnnnnnnnnnnnnnnnnnnnnnnnnnnnnnnnnnnnnnnnnnnnnnnnnnnnnnnnnnnnnnnnnnnnnnnnnnnnnnnnnnnnnnnnnnnnnnnnnnnnnnnnnnnnnnnnnnnnnnnnnnnnnnnnnnnnnnnnnnnnnnnnnnnnnnnnnnnnnnnnnnnnnnnnnnnnnnnnnnnnnnnnnnnnnnnnnnnnnnnnnnnnnnnnnnnnnnnnnnnnnnnnnnnnnnnnnnnnnnnnnnnnnnnnnnnnnnnnnnnnnnnnnnnnnnnnnnnnnnnnnnnnnnnnnnnnnnnnnnnnnnnnnnnnnnnnnnnnnnnnnnnnnnnnnnnnnnnnnnnnnnnnnnnnnnnnnnnnnnnnnnnnnnnnnnnnnnnnnnnnnnnnnnnnnnnnnnnnnnnnnnnnnnnnnnnnnnnnnnnnnnnnnnnnnnnnnnnnnnnnnnnnnnnnnnnnnnnnnnnnnnnnnnnnnnnnnnnnnnnnnnnnnnnnnnnnnnnnnnnnnnnnnnnnnnnnnnnnnnnnnnnntggtggtgaaactcttacttaaaactggacacgttgatttgcagccaaaggacgacccctttggttggacaccgctgtatgtcgctgcatggcatggctacgaagcggtggtgaagcttttacttgcgaccgagggtgttgacgcagattcaaaggactccaacggctggacaccgttgttgcgggctgcgcaggcgggccacgaggcggtggtggaatgtttacttgagactgaacaagttgttgtgcagccagaggaaggccccggcgattggacaccgctgtccgtcgccacgcagaatggccatgaagcggtggtggagcttttacggtggagcgagtggcgaagcttttggaatcgagcaggtcgataaatcaggaattcgtaaacaatataaacgggcttgaaactcgcattcccataaagattcatgctttaaaggggctagcttggcgccatcttggcgtgatcactggtgattgaatgtgaaaaccaacctctaccaaggaacgaaggcttccgaagtggtgccaattaggtcgacttacagattaatacagcggctaaatatccagattactctatgtaagaaacaatacacggcccactaacaaggatactccggaataactcccaatatagactagtctgtcttggcagttagggtttgagaaacaatcgaagagtgcaagtggtgacaccagtttcgggaagtactgtatcgcagcggtaccctatacactgtaccctatacagtttcgagaagtactgtattccaaggacatactcgagagatagagagaccggaccatggggatgaccacgagaagccagccatctcccacccccgaagccgcaaaccccacaatctcacccgaataccccaacgttgaggacttttctctcgccgaggatgattctcatgatgaggacgattctcacgtcgaggatgattctcacgatgaggattactttctcgtctcaatcacctacgactactccaccatcacagcccgagctcgttcgttccaaggaatagtgcttgctggggccactccgctccaactggcccagaatggcttctattaccgaccttcaggagtcagcaatgtggcatgctgttttgcctgccaatcgaccaagcacttatccaccctccaatgcaccccgttcgaggaagtgcaacagctacacgaggaagactgcatatggcagataatctcgtgcgatttgaaacaccacctcggaacccccaacaaaccgccctcctcaaccaccgcattcccctcccctaaaccgtcaactcctaccgccgattccagtacacaaactacagacgactccagtataaagtctcaaactcaatccacgccgatcacatttacttcagcgaaggaacggttgaacactaacctggactgccgttccaatccgctacccaccataattgacccagagcctcaacaacctccaacagcccactctccccagcttcatcaaacgataccgtccatcacttcctcgccccaaaaccaacaaacaacgtatgcttccgtcctccagcgacctgtcacatccataccgcgaccgactcctccagtgcaagaaccttttcttcccgccaaccccacactcacaattgaagatcttcatctccgttttcacaataaaccgtcaccgttccaggtcgagaataagacaagccaacgctcaaccaaacgaactcggaacaaaaccgtatctgtcacacaatcactgtccagattcttagcctctgctttgcccgcattctcgcggttcttaacagagatgcagccaaaatcggacgcttgctgtccgtctcattcgtatatttctcacagccgcgccatgagagcagcctaataccgcaaacggcagcaaggccacgacaggccttaccaggtgaggctcaaagttcaccgttcaggcagtttggatcaatcccagggatcaaccaagatgtatttagaaagttgctgtagcctgtatatcgttcgcgagaggtcagggtaaatgaattctactactgtatcgcagcgagtttctcgtgggttagtacgtgggttagtaggctggcttgaaggtgcttctccaagtgttcaacatcctatcttcggcagttgaagcgcgtctaccatgtgtagcacgaggtggtgggtaagtagggtcggaagaaggggtaggggttatgttggtcgatatgttcaagtggcctcgagtcggcccgtcgcaatggcgaaacgtatggaggcctgtactgcctctaggtttagcgtccgcttctgatcatcagaaggctgttttccgcccaggaagaaagatatgtttcctcggtgagtctgcgtgcattgtaacatttccgtccggtacgtcatccacttccgacatcggaaaaggaagtgnnnnnnnnnnnnnnnnnnnnnnnnnnnnnnnnnnnnnnnnnnnnnnnnnnnnnnnnnnnnnnnnnnnnnnnnnnnnnnnnnnnnnnnnnnnnnnnnnnnnnnnnnnnnnnnnnnnnnnnnnnnnnnnnnnnnnnnnnnnnnnnnnnnnnnnnnnnnnnnnnnnnnnnnnnnnnnnnnnnnnnnnnnnnnnnnnnnnnnnnnnnnnnnnnnnnnnnnnnnnnnnnnnnnnnnnnnnnnnnnnnnnnnnnnnnnnnnnnnnnnnnnnnnnnnnnnnnnnnnnnnnnnnnnnnnnnnnnnnnnnnnnnnnnnnnnnnnnnnnnnnnnnnnnnnnnnnnnnnnnnnnnnnnnnnnnnnnnnnnnnnnnnnnnnnnnnnnnnnnnnnnnnnnnnnnnnnnnnnnnnnnnnnnnnnnnnnnnnnnnnnnnnnnnnnnnnnnnnnnnnnnnnnnnnnnnnnnnnnnnnnnnnnnnnnnnnnnnnnnnnnnnnnnnnnnnnnnnnnnnnnnnnnnnnnnnnnnnnnnnnnnnnnnnnnnnnnnnnnnnnnnnnnnnnnnnnnnnnnnnnnnnnnnnnnnnnnnnnnnnnnnnnnnnnnnnnnnnnnnnnnnnnnnnnnnnnnnnnnnnnnnnnnnnnnnnnnnnnnnnnnnnnnnnnnnnnnnnnnnnnnnnnnnnnnnnnnnnnnnnnnnnnnnnnnnnnnnnnnnnnnnnnnnnnnnnnnnnnnnnnnnnnnnnnnnnnnnnnnnnnnnnnnnnnnnnnnnnnnnnnnnnnnnnnnnnnnnnnnnnnnnnnnnnnnnnnnnnnnnnnnnnnnnnnnnnnnnnnnnnnnnnnnnnnnnnnnnnnnnnnnnnnnnnnnnnnnnnnnnnnnnnnnnnnnnnnnnnnnnnnnnnnnnnnnnnnnnnnnnnnnnnnnnnnnnnnnnnnnnnnnnnnnnnnnnnnnnnnnnnnnnnnnnnnnnnnnnnnnnnnnnnnnnnnnnnnnnnnnnnnnnnnnnnnnnnnnnnnnnnnnnnnnnnnnnnnnnnnnnnnnnnnnnnnnnnnnnnnnnnnnnnnnnnnnnnnnnnnnnnnnnnnnnnnnnnnnnnnnnnnnnnnnnnnnnnnnnnnnnnnnnnnnnnnnnnnnnnnnnnnnnnnnnnnnnnnnnnnnnnnnnnnnnnnnnnnnnnnnnnnnnnnnnnnnnnnnnnnnnnnnnnnnnnnnnnnnnnnnnnnnnnnnnnnnnnnnnnnnnnnnnnnnnnnnnnnnnnnnnnnnnnnnnnnnnnnnnnnnnnnnnnnnnnnnnnnnnnnnnnnnnnnnnnnnnnnnnnnnnnnnnnnnnnnnnnnnnnnnnnnnnnnnnnnnnnnnnnnnnnnnnnnnnnnnnnnnnnnnnnnnnnnnnnnnnnnnnnnnnnnnnnnnnnnnnnnnnnnnnnnnnnnnnnnnnnnnnnnnnnnnnnnnnnnnnnnnnnnnnnnnnnnnnnnnnnnnnnnnnnnnnnnnnnnnnnnnnnnnnnnnnnnnnnnnnnnnnnnnnnnnnnnnnnnnnnnnnnnnnnnnnnnnnnnnnnnnnnnnnnnnnnnnnnnnnnnnnnnnnnnnnnnnnnnnnnnnnnnnnnnnnnnnnnnnnnnnnnnnnnnnnnnnnnnnnnnnnnnnnnnnnnnnnnnnnnnnnnnnnnnnnnnnnnnnnnnnnnnnnnnnnnnnnnnnnnnnnnnnnnnnnnnnnnnnnnnnnnnnnnnnnnnnnnnnnnnnnnnnnnnnnnnnnnnnnnnnnnnnnnnnnnnnnnnnnnnnnnnnnnnnnnnnnnnnnnnnnnnnnnnnnnnnnnnnnnnnnnnnnnnnnnnnnnnnnnnnnnnnnnnnnnnnnnnnnnnnnnnnnnnnnnnnnnnnnnnnnnnnnnnnnnnnnnnnnnnnnnnnnnnnnnnnnnnnnnnnnnnnnnnnnnnnnnnnnnnnnnnnnnnnnnnnnnnnnnnnnnnnnnnnnnnnnnnnnnnnnnnnnnnnnnnnnnnnnnnnnnnnnnnnnnnnnnnnnnnnnnnnnnnnnnnnnnnnnnnnnnnnnnnnnnnnnnnnnnnnnnnnnnnnnnnnnnnnnnnnnnnnnnnnnnnnnnnnnnnnnnnnnnnnnnnnnnnnnnnnnnnnnnnnnnnnnnnnnnnnnnnnnnnnnnnnnnnnnnnnnnnnnnnnnnnnnnnnnnnnnnnnnnnnnnnnnnnnnnnnnnnnnnnnnnnnnnnnnnnnnnnnnnnnnnnnnnnnnnnnnnnnnnnnnnnnnnnnnnnnnnnnnnnnnnnnnnnnnnnnnnnnnnnnnnnnnnnnnnnnnnnnnnnnnnnnnnnnnnnnnnnnnnnnnnnnnnnnnnnnnnnnnnnnnnnnnnnnnnnnnnnnnnnnnnnnnnnnnnnnnnnnnnnnnnnnnnnnnnnnnnnnnnnnnnnnnnnnnnnnnnnnnnnnnnnnnnnnnnnnnnnnnnnnnnnnnnnnnnnnnnnnnnnnnnnnnnnnnnnnnnnnnnnnnnnnnnnnnnnnnnnnnnnnnnnnnnnnnnnnnnnnnnnnnnnnnnnnnnnnnnnnnnnnnnnnnnnnnnnnnnnnnnnnnnnnnnnnnnnnnnnnnnnnnnnnnnnnnnnnnnnnnnnnnnnnnnnnnnnnnnnnnnnnnnnnnnnnnnnnnnnnnnnnnnnnnnnnnnnnnnnnnnnnnnnnnnnnnnnnnnnnnnnnnnnnnnnnnnnnnnnnnnnnnnnnnnnnnnnnnnnnnnnnnnnnnnnnnnnnnnnnnnnnnnnnnnnnnnnnnnnnnnnnnnnnnnnnnnnnnnnnnnnnnnnnnnnnnnnnnnnnnnnnnnnnnnnnnnnnnnnnnnnnnnnnnnnnnnnnnnnnnnnnnnnnnnnnnnnnnnnnnnnnnnnnnnnnnnnnnnnnnnnnnnnnnnnnnnnnnnnnnnnnnnnnnnnnnnnnnnnnnnnnnnnnnnnnnnnnnnnnnnnnnnnnnnnnnnnnnnnnnnnnnnnnnnnnnnnnnnnnnnnnnnnnnnnnnnnnnnnnnnnnnnnnnnnnnnnnnnnnnnnnnnnnnnnnnnnnnnnnnnnnnnnnnnnnnnnnnnnnnnnnnnnnnnnnnnnnnnnnnnnnnnnnnnnnnnnnnnnnnnnnnnnnnnnnnnnnnnnnnnnnnnnnnnnnnnnnnnnnnnnnnnnnnnnnnnnnnnnnnnnnnnnnnnnnnnnnnnnnnnnnnnnnnnnnnnnnnnnnnnnnnnnnnnnnnnnnnnnnnnnnnnnnnnnnnnnnnnnnnnnnnnnnnnnnnnnnnnnnnnnnnnnnnnnnnnnnnnnnnnnnnnnnnnnnnnnnnnnnnnnnnnnnnnnnnnnnnnnnnnnnnnnnnnnnnnnnnnnnnnnnnnnnnnnnnnnnnnnnnnnnnnnnnnnnnnnnnnnnnnnnnnnnnnnnnnnnnnnnnnnnnnnnnnnnnnnnnnnnnnnnnnnnnnnnnnnnnnnnnnnnnnnnnnnnnnnnnnnnnnnnnnnnnnnnnnnnnnnnnnnnnnnnnnnnnnnnnnnnnnnnnnnnnnnnnnnnnnnnnnnnnnnnnnnnnnnnatttcaattacgagggttatcccgcgaagcgcaactctctaccatgagctcatccacctcgtcgttggtactgacaaaacacaagattacacttgtaagttcttgtcggatatgttaggtcagaccaacgctgataacctgaagacgaatggagtaagatgcaaactgcgctcaagaagcccaatggtacgccgtcgaagaaagaagaggaaaaaactgggcaatattgggatggaatgaaatatcaggatatcatgcgtcaaaatcctgagacatttgtcttcttcagcgtggggtattggtattttctgcagactacatggaacaagaatgcgcggaagcggtggagcttcgatactggtgcagctcggctcgtggcgatataggcaaatgacgaaaatggaaatggacattttctagaagcgaaatcgacaaatttggtacacaatcactgttcaaagtttgacagggccttgaaagctgcctttttgcttctttcttatatacagttgcatagaaagcactttgggatttgggacttcacacttgtcctcgcttgttttcacttgtttgtcgctggtttgtttcgtataattttgtacggcagaatacggagtaagatcgtgagagttgctctattaagggtatgaggaatttagtagtagtcgctaccaatagcaaagagtaaatttcaaatcaaaaacaaagacattcaagcaagagtgattggcttgaaatcacaaaactcttccttccattccaaggctccgacgctttctagcttatcaacaaacttctctagtagggttctcgcgtcccacataagatagccactgttggaatatttcccaacatgcctatactcggcgctctttgcgtccgtccagaagtgcggccatagcatcaactgagcttcttggccatgcacgagctctgttccaatggcccatatctttaatggaaggtcggtttgacgacgcttcacaccatgccgcacaccgccaatccctgcagccggttcacgaataccaatcaaatccgaaatctgagtcttctgggcatcggtcactggtgtcaaaaagtatatccagaacaattccacgtaagagcacgttaacgcatcaaaccagctagggcccacatagtcggagctcctctgcgaaaatgtctctcgagaggacgtagctctgattcctctagcttcgaggttctcccgatagagctgggcggaaggcgaggccatgaatgccctcatatccgaggctctctcccatgcttggtggcagttagcgggacgacctttgattcccggttgatacacaactcacctgtaactaaaagaattgtatccgggcgctcctgcactcttgcatacccggaaccctcgtgccctggggcccgaagcagtggctggaaatgtccagcccattcggtatccagctccagtcccttggaaacttgaaactcggtccagattaggattgcttggtcgttgaggtcgtcaacctgtgatcgatctatagtatcatctcccaagggcgccatgactggagagggttgattcggatctgaacaggatttttggagagaacgactgggggcactggggttttactaagggcactagcgctagcgttgtttcgcctttggccactattcaacgcggtccctttcgtttcaatactggtaatgctatggtaaataaaccacgtgacatttctccttggcgttgtgagaaatcatattagtcaccatacttcgaatattgaagctatttgttagagtggtcacgtgattagcatgtgatcagccacgtgatcccaccgagtcctagccaatgagactataccgccgccaagtgcggttgagaaatctgggtttttacaaggatgcggctagtgatgggcgcattgctacagacgttgtgaatcaaagcacttcattactcccaccgttcatgcacgcgagactaaggccgtgcgttgatcaccagagccggataatcccgcaatcctctcagagttgactccgctttgaaatcgtaaatcaaacccgcctgagacaggaggtcagtaatatcccgaatacacaatttattagcgcccggcagctaagccgaaagggcaactatctttgatctactatacatgtcataatatatatagtacgatgtctcctccgagcccatacatgaagccttgcaatatatgtcatctcagatgtccgtatcgcagcggatcctcgtgggttagtaattgtgttagtaggctggcttgaaggcgcttctccaagtattcaacatcctattttcggcagttgaagcgcgtctaccgtctgtaacacgaggtggttggtgggttagatcggcgaaaggggggtgatttatgttcgtcggcgtggttaggtggcctcgagtcggcccgtggcgatggcgaatcgtattgaggcccgtaccgcgtctaagttcggcgtccacttctgatcatcggaaggcgactttcctcctaggaagaaggatatgtttcctcggtaggtgttggtacattgtaatagttccatccggtgcgccgtccatttttgacatcgaaataggaagtgnac

SEQ ID NO: 58 - DNA, 2508837 bp, Penicillium roqueforti (residues 1-1,254,419 of 2,508,837)
  misc_feature (1216)..(6722): n is a, c, g, or t
  misc_feature (98486)..(98857): n is a, c, g, or t
  misc_feature (139973)..(140068): n is a, c, g, or t
  misc_feature (294298)..(294473): n is a, c, g, or t
  misc_feature (357308)..(357493): n is a, c, g, or t
  misc_feature (460841)..(460917): n is a, c, g, or t
  misc_feature (472433)..(472614): n is a, c, g, or t
  misc_feature (615584)..(615865): n is a, c, g, or t
  misc_feature (740253)..(740361): n is a, c, g, or t
  misc_feature (916195)..(916331): n is a, c, g, or t
  misc_feature (1075365)..(1075510): n is a, c, g, or t
  misc_feature (1089816)..(1208316): n is a, c, g, or t
  misc_feature (1219906)..(1219947): n is a, c, g, or t
  misc_feature (1222307)..(1222480): n is a, c, g, or t
  misc_feature (1321962)..(1322032): n is a, c, g, or t
  misc_feature (1378114)..(1378486): n is a, c, g, or t
  misc_feature (1383157)..(1383516): n is a, c, g, or t
  misc_feature (1417201)..(1417461): n is a, c, g, or t
  misc_feature (1457179)..(1457373): n is a, c, g, or t
  misc_feature (1553365)..(1553435): n is a, c, g, or t
  misc_feature (1556267)..(1556371): n is a, c, g, or t
  misc_feature (1567978)..(1568073): n is a, c, g, or t
  misc_feature (1711154)..(1716896): n is a, c, g, or t
  misc_feature (1761963)..(1762104): n is a, c, g, or t
  misc_feature (1945843)..(1945940): n is a, c, g, or t
  misc_feature (1956443)..(1956565): n is a, c, g, or t
  misc_feature (2133091)..(2133194): n is a, c, g, or t
  misc_feature (2256470)..(2256628): n is a, c, g, or t
  misc_feature (2267769)..(2267800): n is a, c, g, or t
  misc_feature (2288112)..(2288280): n is a, c, g, or t
  misc_feature (2341509)..(2341527): n is a, c, g, or t
  misc_feature (2431121)..(2431466): n is a, c, g, or t
  misc_feature (2438830)..(2439280): n is a, c, g, or t
  misc_feature (2445112)..(2445256): n is a, c, g, or t
  misc_feature (2482480)..(2482688): n is a, c, g, or t
  misc_feature (2508831)..(2508832): n is a, c, g, or t
  misc_feature (2508834)..(2508835): n is a, c, g, or t
ttaaggtaagaaaaataagtcctacttagttaagtagtatggctataacgatattaaagtaacctaggaaccgcaatctataattaaggatactaaggcccttaataactataaggctaagttaactatagtaacgaaaataccgaagaagaataggactaagaatatatacccgaaatataagaagctttaattatagattaaaatttagtactacgtttcctatacttatatataggtataggtagggttattatatctaaccagactcaaatactaacagagcagtattaaaaatataataaagcagcgaaacagactctatacttagggtatcctaggaagtaggggctaagtttatagggataaataaagcgttactaggtatacctatattagaaactacgctttcttccgtaatactagtaggagtatcgaagaattcctcagctttagagatttcccctatattctctataactcctagggccctaataactttagcgaccactgtaacctctgcggcttttataatagtagtagcctttttagccttattagctatataggttaagcgcttaacattctactcgataatatatacttagggtatacgagtatatataggtgatatattaagagcggtataggtagtagactaaaccttagaaggaagctatactattattaataacgaattccttcctataataatatagttaaaaaacttataaggatataactgtactttacagaagagtagtaaatatatttagtataacctataagggtcttatacttatggtctaggtagctttataactggaaaaagtaccgctagtaaggtaatagcctctcgataggcttaggggtttctaagtatagaggtagagttataggcctatagcctactaaaagataacgttatacctatagatatagagatttatcctccttagaggaggatagtataggacagcaatatactattactattttataaatatagttagtatataaatataaaaataaggccgttttctataaggaagggacagatataatattaaaatttcttagtatactatatagaatgtaatactactaaatctaaagatatatctactatatttactagctaatagtaataccctaactagaataatattatcttaatagaagtataatagaaatttaatagaaatataaattaggnnnnnnnnnnnnnnnnnnnnnnnnnnnnnnnnnnnnnnnnnnnnnnnnnnnnnnnnnnnnnnnnnnnnnnnnnnnnnnnnnnnnnnnnnnnnnnnnnnnnnnnnnnnnnnnnnnnnnnnnnnnnnnnnnnnnnnnnnnnnnnnnnnnnnnnnnnnnnnnnnnnnnnnnnnnnnnnnnnnnnnnnnnnnnnnnnnnnnnnnnnnnnnnnnnnnnnnnnnnnnnnnnnnnnnnnnnnnnnnnnnnnnnnnnnnnnnnnnnnnnnnnnnnnnnnnnnnnnnnnnnnnnnnnnnnnnnnnnnnnnnnnnnnnnnnnnnnnnnnnnnnnnnnnnnnnnnnnnnnnnnnnnnnnnnnnnnnnnnnnnnnnnnnnnnnnnnnnnnnnnnnnnnnnnnnnnnnnnnnnnnnnnnnnnnnnnnnnnnnnnnnnnnnnnnnnnnnnnnnnnnnnnnnnnnnnnnnnnnnnnnnnnnnnnnnnnnnnnnnnnnnnnnnnnnnnnnnnnnnnnnnnnnnnnnnnnnnnnnnnnnnnnnnnnnnnnnnnnnnnnnnnnnnnnnnnnnnnnnnnnnnnnnnnnnnnnnnnnnnnnnnnnnnnnnnnnnnnnnnnnnnnnnnnnnnnnnnnnnnnnnnnnnnnnnnnnnnnnnnnnnnnnnnnnnnnnnnnnnnnnnnnnnnnnnnnnnnnnnnnnnnnnnnnnnnnnnnnnnnnnnnnnnnnnnnnnnnnnnnnnnnnnnnnnnnnnnnnnnnnnnnnnnnnnnnnnnnnnnnnnnnnnnnnnnnnnnnnnnnnnnnnnnnnnnnnnnnnnnnnnnnnnnnnnnnnnnnnnnnnnnnnnnnnnnnnnnnnnnnnnnnnnnnnnnnnnnnnnnnnnnnnnnnnnnnnnnnnnnnnnnnnnnnnnnnnnnnnnnnnnnnnnnnnnnnnnnnnnnnnnnnnnnnnnnnnnnnnnnnnnnnnnnnnnnnnnnnnnnnnnnnnnnnnnnnnnnnnnnnnnnnnnnnnnnnnnnnnnnnnnnnnnnnnnnnnnnnnnnnnnnnnnnnnnnnnnnnnnnnnnnnnnnnnnnnnnnnnnnnnnnnnnnnnnnnnnnnnnnnnnnnnnnnnnnnnnnnnnnnnnnnnnnnnnnnnnnnnnnnnnnnnnnnnnnnnnnnnnnnnnnnnnnnnnnnnnnnnnnnnnnnnnnnnnnnnnnnnnnnnnnnnnnnnnnnnnnnnnnnnnnnnnnnnnnnnnnnnnnnnnnnnnnnnnnnnnnnnnnnnnnnnnnnnnnnnnnnnnnnnnnnnnnnnnnnnnnnnnnnnnnnnnnnnnnnnnnnnnnnnnnnnnnnnnnnnnnnnnnnnnnnnnnnnnnnnnnnnnnnnnnnnnnnnnnnnnnnnnnnnnnnnnnnnnnnnnnnnnnnnnnnnnnnnnnnnnnnnnnnnnnnnnnnnnnnnnnnnnnnnnnnnnnnnnnnnnnnnnnnnnnnnnnnnnnnnnnnnnnnnnnnnnnnnnnnnnnnnnnnnnnnnnnnnnnnnnnnnnnnnnnnnnnnnnnnnnnnnnnnnnnnnnnnnnnnnnnnnnnnnnnnnnnnnnnnnnnnnnnnnnnnnnnnnnnnnnnnnnnnnnnnnnnnnnnnnnnnnnnnnnnnnnnnnnnnnnnnnnnnnnnnnnnnnnnnnnnnnnnnnnnnnnnnnnnnnnnnnnnnnnnnnnnnnnnnnnnnnnnnnnnnnnnnnnnnnnnnnnnnnnnnnnnnnnnnnnnnnnnnnnnnnnnnnnnnnnnnnnnnnnnnnnnnnnnnnnnnnnnnnnnnnnnnnnnnnnnnnnnnnnnnnnnnnnnnnnnnnnnnnnnnnnnnnnnnnnnnnnnnnnnnnnnnnnnnnnnnnnnnnnnnnnnnnnnnnnnnnnnnnnnnnnnnnnnnnnnnnnnnnnnnnnnnnnnnnnnnnnnnnnnnnnnnnnnnnnnnnnnnnnnnnnnnnnnnnnnnnnnnnnnnnnnnnnnnnnnnnnnnnnnnnnnnnnnnnnnnnnnnnnnnnnnnnnnnnnnnnnnnnnnnnnnnnnnnnnnnnnnnnnnnnnnnnnnnnnnnnnnnnnnnnnnnnnnnnnnnnnnnnnnnnnnnnnnnnnnnnnnnnnnnnnnnnnnnnnnnnnnnnnnnnnnnnnnnnnnnnnnnnnnnnnnnnnnnnnnnnnnnnnnnnnnnnnnnnnnnnnnnnnnnnnnnnnnnnnnnnnnnnnnnnnnnnnnnnnnnnnnnnnnnnnnnnnnnnnnnnnnnnnnnnnnnnnnnnnnnnnnnnnnnnnnnnnnnnnnnnnnnnnnnnnnnnnnnnnnnnnnnnnnnnnnnnnnnnnnnnnnnnnnnnnnnnnnnnnnnnnnnnnnnnnnnnnnnnnnnnnnnnnnnnnnnnnnnnnnnnnnnnnnnnnnnnnnnnnnnnnnnnnnnnnnnnnnnnnnnnnnnnnnnnnnnnnnnnnnnnnnnnnnnnnnnnnnnnnnnnnnnnnnnnnnnnnnnnnnnnnnnnnnnnnnnnnnnnnnnnnnnnnnnnnnnnnnnnnnnnnnnnnnnnnnnnnnnnnnnnnnnnnnnnnnnnnnnnnnnnnnnnnnnnnnnnnnnnnnnnnnnnnnnnnnnnnnnnnnnnnnnnnnnnnnnnnnnnnnnnnnnnnnnnnnnnnnnnnnnnnnnnnnnnnnnnnnnnnnnnnnnnnnnnnnnnnnnnnnnnnnnnnnnnnnnnnnnnnnnnnnnnnnnnnnnnnnnnnnnnnnnnnnnnnnnnnnnnnnnnnnnnnnnnnnnnnnnnnnnnnnnnnnnnnnnnnnnnnnnnnnnnnnnnnnnnnnnnnnnnnnnnnnnnnnnnnnnnnnnnnnnnnnnnnnnnnnnnnnnnnnnnnnnnnnnnnnnnnnnnnnnnnnnnnnnnnnnnnnnnnnnnnnnnnnnnnnnnnnnnnnnnnnnnnnnnnnnnnnnnnnnnnnnnnnnnnnnnnnnnnnnnnnnnnnnnnnnnnnnnnnnnnnnnnnnnnnnnnnnnnnnnnnnnnnnnnnnnnnnnnnnnnnnnnnnnnnnnnnnnnnnnnnnnnnnnnnnnnnnnnnnnnnnnnnnnnnnnnnnnnnnnnnnnnnnnnnnnnnnnnnnnnnnnnnnnnnnnnnnnnnnnnnnnnnnnnnnnnnnnnnnnnnnnnnnnnnnnnnnnnnnnnnnnnnnnnnnnnnnnnnnnnnnnnnnnnnnnnnnnnnnnnnnnnnnnnnnnnnnnnnnnnnnnnnnnnnnnnnnnnnnnnnnnnnnnnnnnnnnnnnnnnnnnnnnnnnnnnnnnnnnnnnnnnnnnnnnnnnnnnnnnnnnnnnnnnnnnnnnnnnnnnnnnnnnnnnnnnnnnnnnnnnnnnnnnnnnnnnnnnnnnnnnnnnnnnnnnnnnnnnnnnnnnnnnnnnnnnnnnnnnnnnnnnnnnnnnnnnnnnnnnnnnnnnnnnnnnnnnnnnnnnnnnnnnnnnnnnnnnnnnnnnnnnnnnnnnnnnnnnnnnnnnnnnnnnnnnnnnnnnnnnnnnnnnnnnnnnnnnnnnnnnnnnnnnnnnnnnnnnnnnnnnnnnnnnnnnnnnnnnnnnnnnnnnnnnnnnnnnnnnnnnnnnnnnnnnnnnnnnnnnnnnnnnnnnnnnnnnnnnnnnnnnnnnnnnnnnnnnnnnnnnnnnnnnnnnnnnnnnnnnnnnnnnnnnnnnnnnnnnnnnnnnnnnnnnnnnnnnnnnnnnnnnnnnnnnnnnnnnnnnnnnnnnnnnnnnnnnnnnnnnnnnnnnnnnnnnnnnnnnnnnnnnnnnnnnnnnnnnnnnnnnnnnnnnnnnnnnnnnnnnnnnnnnnnnnnnnnnnnnnnnnnnnnnnnnnnnnnnnnnnnnnnnnnnnnnnnnnnnnnnnnnnnnnnnnnnnnnnnnnnnnnnnnnnnnnnnnnnnnnnnnnnnnnnnnnnnnnnnnnnnnnnnnnnnnnnnnnnnnnnnnnnnnnnnnnnnnnnnnnnnnnnnnnnnnnnnnnnnnnnnnnnnnnnnnnnnnnnnnnnnnnnnnnnnnnnnnnnnnnnnnnnnnnnnnnnnnnnnnnnnnnnnnnnnnnnnnnnnnnnnnnnnnnnnnnnnnnnnnnnnnnnnnnnnnnnnnnnnnnnnnnnnnnnnnnnnnnnnnnnnnnnnnnnnnnnnnnnnnnnnnnnnnnnnnnnnnnnnnnnnnnnnnnnnnnnnnnnnnnnnnnnnnnnnnnnnnnnnnnnnnnnnnnnnnnnnnnnnnnnnnnnnnnnnnnnnnnnnnnnnnnnnnnnnnnnnnnnnnnnnnnnnnnnnnnnnnnnnnnnnnnnnnnnnnnnnnnnnnnnnnnnnnnnnnnnnnnnnnnnnnnnnnnnnnnnnnnnnnnnnnnnnnnnnnnnnnnnnnnnnnnnnnnnnnnnnnnnnnnnnnnnnnnnnnnnnnnnnnnnnnnnnnnnnnnnnnnnnnnnnnnnnnnnnnnnnnnnnnnnnnnnnnnnnnnnnnnnnnnnnnnnnnnnnnnnnnnnnnnnnnnnnnnnnnnnnnnnnnnnnnnnnnnnnnnnnnnnnnnnnnnnnnnnnnnnnnnnnnnnnnnnnnnnnnnnnnnnnnnnnnnnnnnnnnnnnnnnnnnnnnnnnnnnnnnnnnnnnnnnnnnnnnnnnnnnnnnnnnnnnnnnnnnnnnnnnnnnnnnnnnnnnnnnnnnnnnnnnnnnnnnnnnnnnnnnnnnnnnnnnnnnnnnnnnnnnnnnnnnnnnnnnnnnnnnnnnnnnnnnnnnnnnnnnnnnnnnnnnnnnnnnnnnnnnnnnnnnnnnnnnnnnnnnnnnnnnnnnnnnnnnnnnnnnnnnnnnnnnnnnnnnnnnnnnnnnnnnnnnnnnnnnnnnnnnnnnnnnnnnnnnnnnnnnnnnnnnnnnnnnnnnnnnnnnnnnnnnnnnnnnnnnnnnnnnnnnnnnnnnnnnnnnnnnnnnnnnnnnnnnnnnnnnnnnnnnnnnnnnnnnnnnnnnnnnnnnnnnnnnnnnnnnnnnnnnnnnnnnnnnnnnnnnnnnnnnnnnnnnnnnnnnnnnnnnnnnnnnnnnnnnnnnnnnnnnnnnnnnnnnnnnnnnnnnnnnnnnnnnnnnnnnnnnnnnnnnnnnnnnnnnnnnnnnnnnnnnnnnnnnnnnnnnnnnnnnnnnnnnnnnnnnnnnnnnnnnnnnnnnnnnnnnnnnnnnnnnnnnnnnnnnnnnnnnnnnnnnnnnnnnnnnnnnnnnnnnnnnnnnnnnnnnnnnnnnnnnnnnnnnnnnnnnnnnnnnnnnnnnnnnnnnnnnnnnnnnnnnnnnnnnnnnnnnnnnnnnnnnnnnnnnnnnnnnnnnnnnnnnnnnnnnnnnnnnnnnnnnnnnnnnnnnnnnnnnnnnnnnnnnnnnnnnnnnnnnnnnnnnnnnnnnnnnnnnnnnnnnnnnnnnnnnnnnnnnnnnnnnnnnnnnnnnnnnnnnnnnnnnnnnnnnnnnnnnnnnnnnnnnnnnnnnnnnnnnnnnnnnnnnnnnnnnnnnnnnnnnnnnnnnnnnnnnnnnnnnnnnnnnnnnnnnnnnnnnnnnnnnnnnnnnnnnnnnnnnnnnnnnnnnnnnngattatgggtttcccggcccattggtgggctgggctgggctgggctatgggctgggtgggctttgccgatgtctacctataagtaactttaagaatactcccgaaaagatcaagcagttctatgatcagtacccgtagaagcctagaccaccgatacgattataagaatagaccgatactgcagataaggatagattcttagataaccacgttaacgataataaacctgcatttaggggctaaatgcattcttagccgggggttatataatgatctaagaggatcgtacttgcctaacggggcaggagcggtcacgtcctcgtacttgccgtaggaacgactataccctcgcaccttcctaaaagaacgaacgagaattaagtgagacaaacgcaagagtataagaaggaaagaacacgcacttagatagtttctctttttcctttcttcctcgtacttagaatttggttggaattgcactcttttcctttgaattgaattggctcgtaacaggtatggcgagagcgaggtccttatcgttgaggtaaagggcggcgctaaggggagcaatcctattccctaactcctcggatatatgggttatatctcgctatatgtattaaactatatttaagcaagctaatcggtatgaaagggtgcatccaccgtggacgtaaggacgagcagaagcgcaactgcagtgtctacggtatggcgtatactggatccgttcggcattttttgaaaataagtcacgagtcaaaggtaagctggttaataccagcaaagaacacaactctaatatttattagcggtcggaatttgctactgtcggtcgtcgaggcgctctcgagcagccgttcggtttgctagtatggatgctgcggagggcagctgccatctccccagcccactcaaaggaaaactcagcggaaacttatagtttggtggggtctgaggagatggtgtttgaatgagcggtgctgaggggaaggaggagtgttgtactgattcatggcgcagtgtggtgttggctgatacctcttcccccttctcacttgagtcagctcttatcgcgaggtcaccattactagttggttaatctcttaatacaataacctcaaaaaggaagtgctcgcctcttactcccatgagttcgtgataagagtgctctaaatatttacatattgtattcctattcgaggaacatggccatcggtgcaccttcgtacaacatatactcatagctgcggaatcttggaacctcggaccagcgtgctgcgtacgtaatacgaggtttttaggttttcagggacaggcctggaattatagtaccgccttcctgatctagtactattcaggattctgccatatttctaccgcactttattttttccgccatgtacatatattctatggagacatgcattttgattagacaaaatcttatattctgcctaattcctgtagtattcaactctggatccggatctagcatatgaggcaagaaaagaaaactggagatttcatagttgggggcagcggaggataccgtatacgagggcttatctatttgaaatggcccccattctacagttacaggggtcctcacaaagaggccgaaaagcacaagagacaacgaaaaacatccaactggataagttcctcaatgttcgtcctgtcgagaatacgaagcctcccttcttccaattggtggccgcaaaaagtacctgaagggccttacgataagccctacgaatacctttcaaagcgcctcacaggacgccagcggggctcgaaagggccgtcaaaatcccaaggccccaattagaatgaatatcttcgattatacgctggaggtttattcggtacgatttgatccccattgctacttttcatactgtgacggtgtactccgtacagaaatttgtgtgcagataaggaagctagataacccgtcggagcttacgggctagccaaacgttctaaccgctttagcctgacttatacgtaaggtagagcggcctcggcatgttcgggattcgagaccaatgtcactctccatagagagaggaaaagcttctttgtgtctgcgttgaacttactccatactgagtacctggatcgagtggcgctccaatcgtagatttaagaatgatgcagtctgcagccaatacaatggtgttacccctcaacgtgccatgcatgctatgcatagggagtggaggtaatccagggtcaattactcttgatcacagcagggttgaatttttacagttttagtcgcaatgggaaccttggaatcacggaatactcgagaccgctctatcctgactattgggcagcgttgccctcactaggatcggcgcgtttgagatcggcgcgttgagatcggcggcctcaacgtcgggaactcaatgctattgatgagaccaagctttatggtccagcagaagctgcagaattttcacgccacggatctcagaacggcctatcattgggggaaaattatatggccaaacctggaccgtagtggaaaacaatgtggatgaaacttacataggtgaacacatgggatcgatttccttgccaagtaacctaattacctgccaagagccttggcaagccctagttcgggaagtggattccccagcacttatctacctcgtactccgtacggagtacgaggtactccgaggtactccgtatgtacgatgtatgtaactctgaaatatctacgcagctgataggtgggctattaattaacaaaaaggtgtgctccatgttttgcattacatagtgtagatcattttcattctatatgataatggccaaattacataattgtagggcggattgttgccaatgctgccatgtggacctttccggacatagcttccaatactttgattgatcgcccgagtaattaccctaaatctatcaaaagcccgagcttctggaagcgtatggagtaggtgtgagcatttcccattttatagccatgtgatcggtggtgttggcaatggcctaaattgctgatcagaagcgatcctaaaatccgattatcgtgtcgccctgcctagatccacttcatatgtggtttaagagacattatcattgattgaaagttcttcatgtagcgaaattcggagatttcatgtgaaattgtatagagatatactcagaatatgcatataatcacgctagtttattcgaaacggcgatcctgaaggttggcttatcaagatcatgccggtatattactgcattcggcaaaaggaaattcgaataatatcaaacagaaagtttaataacaaaaagctcaattgaaacaggagtccgattttgacattcggcctccggaaactccaatgtctatcaagaccctagactttcgatcacatcacggccctgagatgatagacgacatgatgtctctatctttgaccaataccatcctctcagctgtgtgatgtacaagctgatctatccgaccatgaacggaattccgtgggtagaccatgagtatcgggatgccctgcggatctttctcttctcagcctcgaccgagcttgccgccgtactttgcatggatgatttcgggatcacaatgaggtctgtgatgtaacttgcaagatgtcggtggatcgggtggatatcgttagtggatacagtaagctgtgaaggactcctacttttgggtctatatcaggtttgtagtgggtgttactagggaatggggcagcatataagtcgtgaaggacttctcctttttgggttgtgtatcaagttgagttgagacattatctgcacaaaagatatatacaatggcagacttatcaagatcttcgtatgttttgtgacatttatcatgatcttttttccacccctttttggatgtcctattgaagtttcttccaattctgaccgtcatacagacttatagaacagcttttacacctccgcagtgaggcctctcatccagactcttgccgtcaactctccgctctattatccctacacaccggctcttggcccatccgtcacctaatcctaacatttcaggacatttacaagtccattcccgaatccatcaaggccaccaacaatgaatcaattacctacctccgtgcacaagtcaaagcagccacccccagcgttgcggaattaatagggacagactcccgcgccggtctcatcgatgctaacaccggacggcatctgacacatattgccatacggcagttcttggagagtttccagcttcccgtgggactctcccgtcatggaaagcctcgcatcgctgtcatcttgcctaacggccctctgatggcagtcgctgttcttgctttcgtcaacaggtacaccattgtgcctatgacaacgaacacggtgccagagcaattacagacagatatagaaaactcgcaagctgatgctgttgtcgcgctggacgctgacattggcaagctgcagctgaacaatggcagtcggccagtgtttggtattgagcaacttgaagacatgactttccgggtggtctctgcgcacaatgcttctggtgcatacaaccatccccccaattctggggacgatatcgccattatcttgttcactagtggtactagtggtactaagaagctggttcccatcacaacttacaacctcatcgcgggtaccatggctaccatagagtcagtcgaactgtccgagacagatatctgtcttaatatgatgcctctgaaccatgtgtatgttccctgccaaattaaattataggaagacagctaacattatcagtggtggcatcatgcgaagtatcttctcacccgtactcgccggcggtgccacaatatgttgcccctcgtttgaccccagcatgttctgggatgccgtgcaaactcctcatatgacaccaacttggtactatgctacacctacaatgcaccagatgattcttgctgaagctgagcaccgccccgatgctgtcaagcaaagtgccatccagtttatctgcaacgctggtggtggtctccctccaacacttgccgtgcagcttcatgaaattttccactgcgccgtcctccccagttacggtatgactgaatgtatgcctattgccgcgccaccgaggagctacaagcttgatcgccatggaacatcgggaaagatcgtcggtcctgaggttgcaattctgaccgagagtggcgagcctgtccagcaaaatgggatgctaggacacatctgcattcgtggatcacccgcttttgaagggtatctgaccccgggaggcaagattgacaccagtgcattcaacgaatccggctggtttgatactggtgatcttggacacctcgacgatgacaactacctgtacatcactggccgcagcaaggaggtcatcaaccgtggtggtgaaattatctctcccgtcgaagtggaaaatgcaatcctgaccacggccaaggatcctgaatccccgctgtatggtcgtattactgagacgttaaccttttctgtcccagacgaggtactgcaagaagttgtcggtgtggttattgtcacacctccgggcttcactaggccggatcttcgccagatacacgaagcactgcagcctattctccaccagcctaagtggcccgctctggtagtatacatggatggcgtgcccaaggcaaacaacaaaatccagcggatcaagctcgcagagcggctgtccctggatatcttaaccacggccacacccctggcaagcaggcactacgaagctgtctgcccacctactggcgctccactcagcgcatcaatctcgaagaacttgtgtgtcatcgatgacaaaataatccgctcagttctcaccaagagagcaaatacccctgacatgcacgtgcaaataaacccgcgcgatgggctcgcccaggttattctgtttgtccagaacccagatgatgaccatgtgacacctgtcgagctccacgaccacctccatggctatctcgtacctagccgtatcattccactcaaaggtcccatgcctctcgacttctacggaaaccccgactcggccgcgatcaatgaggccatccttgcccgcaactcggatggtaacctgtcgcccattcagcagcgcgtacgtgagattttcgctgtggccttgtcttgtgcaccagaggaagtatctcgtcttaccgacttttttgctgctggaggtgatagtcttagtgctggtcgaatggtttcgcaacttcgtcgcgaattcgctattttcctggccggtgacattctcttccaccacagcactgttggagagatagagcacaagatcattgaagctgttgaagttaaggctgccaagggcgacgatggagaagttgacttgcccggttgtgagaagacatacagcagcacgaacccaattatcttgctcctacacctgttaccgactgtgttctttttccccatgaaacgcgccttccaatggatcatgttcgcatatgtcgtggctgagtgctctaatcgatttcccattcgtgagaacctcttcgctcgtttgatgctggttgtttttgccgtgatgtctgctcgcttatgttcacaaattgtgtctcccatctttgctatcatctttaagtggctcgtcatcggtcgctacaaggagggcatgtcacccatgtggggcccgtaccatacgcgctggtggttgacccagaaggtattgcaggtgtgtggaaagggactcttcaacaactacaactggtcccgcattctcttctaccgtttaatcggcgcaaagattggcaaaaatgttaccatgtccgcgtccgctaagcttggcgagtatgatcttattgagattggcgataatgtcgttttggatacctgcatgtgtcgccccttcggcgtggagcgcaatacctctatgcttttgaagcgcattcgcattggcaaagactcgtcgatagggatcaagtctgtcatcgcccctggtgctgacatcccggagaggacctgcattggtcccaactcgtcgagctgggaacttcgggacgccgatgagtctaaccgccaattgctgacctcccagatccccaagcctcattggatctggattctctttattgttgagccaatcaagttgatcacctggacagctgctcgtattacctggatggccgctcttcttcctatggttctcgagttccctactcctgcggcagacatgttccggtctaccctagaatggtacaccagtgatcagcggattgcgttccacatcaccgcaaggatctgtcgtgctgttggtggcccgattgtgctttttattgcagtcttgatcatcaagttcttcctcgatctcatctgtggcaagcccagacctggtcctgcctcaaaacagaccactcgccaaaagattcggagtgcggtgcttgcgcagattctgcccgcaggtgacatccacggactcacccgccttactggtcgtcactacgaatttgtttcaatggctgtccgtgcccttggtggcaaggttggcaagcatgtctactggcctagtgttggtcccgtcactgtcgactttgatctcattgaggttggtaacgatgttgtttttggttctcgctcgactctggtcacatctgatggctacggccgtgatcgcatcgtgatcggtgatggcaccatggttggtgatcgtgtcgtcgctttgcccggtgctaccatcggccgtcaagcaatgataggctccggtgctttgcttcgccggaatggggactatcctgccaacagtgtctggactggtagcaagggtggtgaagctatacagttcccaagttccacctcgacctccacttcgaccgctccaaccatcatcggagatggtggcagcagccccaacactagcggcagcgaagacgagaaaacaccgaccgaaaagcagacctactgtggaactaaagacaaggctgttaccgagatcgctgagcaggaagtggatacatgcaagcctttcggtcgcgccttctaccgccacgaggccaactactacgtcctccgcatgtggcaaattgtcatctattccacttttgcagttattttcactactgtgtattggcttctcaccgtcttgttctcccttttcgttctccgcagtgtcctaagctacagtgatgctgctggtttcaagcaaggcgcctggcgcccattcgttctgtacggcacgctcgcctcgatcctatctgtcatcaccaccgttcaggtcgcccttgccttcggcatcattctctgcatcaaatggacggtcgtgggtcgtcgcaaggaaggctcctaccactgggacaagagcagctacaaccagcgctggcaattcctcctttcctgcgaaacgttgatcaaagactgctatgacggagttggtctcctgcccatgatctctggctctgcctacatttcctggtactaccgcctcttgggtgcgaacattggaaaggactgtgcgatacacgccaacggtagtcccagcatctttttcaccgagccggacctccttacccttggtgaccgtgttgctgtcgatgatgccagtttggtctgccacttgaactcccgtggtggattcgagctgcataccttgaacgttggggatcggagcatcctgcgcgctggatcgcgcttgatgtctggtgcttcgatgggccaggatgcttgtcttttagagcatactctggtcctgtccggagaccatgttgagaatggagatacgctccagggatggccggccgaaggatttgacgggaaacgtgtttagaagtcttagattgttttccatttcttggcgctttgtctttgtcctagagaacagatagactagcaattttagatcggacttctcagattttcattattgttatattgtcatcgagaagatcaagtgcattttaattatgaacagaaatatgccacttctatcacattcttatctgggaattactataccacacacccttttggaccacttcaggtaaggcctttcttatccctgttttgaagactcttttgaagactcttttttttacccatagacctcaactgcccattactcgtatttgtaggatcactataatctattatacgaatcacttcataatctagccggcgccagtatcatgcgacagcctttaattatcaattatttaccggttactttacgaactgcgttattatttcaccatgacggcttcaactgtaaatttcatacaatctactttctaactccgagcccaagatcgtcccgaatccctccccactcccccaccctcactccactttccgccccggctgtgataagaaccgagacaggccacgaggccggctccgacactcgtggtcggctccgacataggctccagcctccgacataggcccagtcgaggacgtagatactagaagggggaaaggcataaaaaccacggagtactccatagtataatcaaccttgcaagatacaaaaagggattgttacagggacccctccaattgctaattcgacccccctttgactaataggacccttgattctgctttattctgccttgcacataaggcaccactttaattctgccagccttaattctaaggcagaagaagaatcaagcggcagaatatatacccggaccttgccaagaccaggcaagtggcagaattctgcctcgacccgatcagaaaggcggtatgtactgaggtcaggtgcccgagattatctaaggcgtgccaaggcctcaagatcttatgcatctttggttttatttgcaattgccagttcctaaattccctgggattttggggatgttgttctttactttcctttgtgtattgctttgttgttcttgttcaaaatatgtcgataatctaattctaacccacctatcagcagatggaaatctggtaggttgaagtcctcaagatcaaccacgcaaagaaagaaatcgactaccctctggtgtttattcacaaagaagcctctaattaagtccaccaagaaatagcaagagaccaaagtgaatcatctttggtttctttgtcggtctaaatctctttggagtcgacatgatcagctttgggttttcggagatgctgttcttttccaaacatgccattggtctaatattatcttcttggctagagagtttataatcaaatcttaaaagcacccacatagactctttgatgaaactgtctggtttggatcctagttcttagatgcgtgttctaatgctaaaaatggaattgattctttgagcttatacttcggccttctggactcgggaccgacgttaccttgaggcatttcttatgggacttgcaaggaagctctcctcggatgcagctgtaaataagacgatgtccttcgcaatcgacaaatctaatacctattcccaatctcgagcctccctccttacctcttaccgtttccttccaaaactcatactttattcaccattgctttcctcgatatgcctgagccccagtggtctaacgctcaaatacctaaggggtttccccgagattggctaaaaacccacgacggctacactgcacctatgccggaggtgcataagattcacctactgagctcaaattctgacgacactgatggactgaaaagctcaaagaccgaggatcctattgaacttccggttctcagcccgaatgatccggttaacgaaatgtataaagtggccctctcaacattcctgcacgaggaattccaaacaaactatatgataaaagacgaccctttgcattacgaacgacgctacgtcgtttggcccggcattgacttgaatagatttcgattaatcgacaccccagctagctttttccgagtgctagagatgtcgcttctgtccgaacatatatatgaaccagaagggaagaaatgggcagtcttaaccgcaaaaagacgcacgcgccttcttaagaacctttgggagcggggggatatacggcttgtcgatgagaagcccctcctcagtgaataccaagtgcgccgcgtggcatcgacaactcgttctgaagtcgagacatatcgagaatttcttcgttaccagcacttcaacatgggaaaagggatgattttccctgaactttgggaggaggaggaagaaggttggtattgggaggagaaaaaaaatcatttacatggctgtatacttgcttaatgctacctcgtgttctacatttctatttctctcagataagtatcttaccattgcctctgtcgctgcttgaactcctcaccccttcgtggattacatatctagttcgctcttgttaatgaatactctgggtctcttgcaatttcacttgtactttagcttgatcaaatcctatcatgatatgttcagatacacaaagaaccaagcaatgtaggattcagaatgtcctaccctctcaatcgagagagtcgttgcaagataaccaaacaaggaaaattgcgacaatttgttttagagtgcattgtcttagtctctcaaagcggtcgacaatggcctttggtttgaagtaatcagaatatggattaaggcataatccactaatttctatgggtgtaatacgtacacttagaaagacaagaagcggaaggttcaatggattcacacaattatatccactatctgctattcgcgccattgcgaatccgatatgaaattcgtcacatggaacttagaggagatctagttctttgaagcaatcactattgattctctttttgagacatccaactcatcatcgtgagttttacgtggacaaaggaaataataagcccagtcctgacgattgttggacagacaacaaatagcctattaaattgaagcgaaatgttgatatggtcgcatactggaacatgaaaccattgtacctagaatctgtgactatggggtacacgatttatcaattatagttgagactagacgtaataaagaaatgggttcagcacgtaaaaggctatactatataatttgtaagtactatcgctcatccgggggtttttattttcactcacttctccgatctcaccaaacatggaagttgttgctacggtcatgagcatcacacgactcttccgacggttgcaagatcgggtatcctcccatgcatcctccattggctccttgctgcttgccatggatacgtgagatttccgtaattcaatatcaagttactgactaaccattcatacctaggtactatcaaaaaggattccaggaaaagcttgatatcaagattgatcgcctgctgctgcttcaggaaaaatctcggctacccaatgagcttggcaccaagcaggttggcacggccacctctttgcccaacaaaagcaagccattcaccattcctcgacttgccactgacttttatcgagagtggaatgattaattcgaggacttgttgcaaaagctcaacccttctttggttgagggccccgaatactcaaatcgaatgatatatatatctggcgatgcaggagtaggaaagacatacttgtgttctgaatttgcggagaagtacaagacttggtagggattttaccctatactctgcttcatatatatcttactccctattcaaagtcactccggcgttctttggattgatgatgttcttaatgacatctcagcattttatgttgagaacaaccgatttgagagcctcaacatcccaacacaggcggcagatgtggttaactggctgactggggttcatgggccatggcttttggtcattgatggcgctgaagatttgacaaaatggaaatgtctttcgtcttgcggtgacaaaaaaacactttcttatcacgaccagaacaacccaatcggacaccgctacctctgttcatatctcagggatggacactaaggattcacaggaattccttttgtgggccgcgggtttcttgaagccttggtttgcctcggatcttgcgtggagtaatgatctcattggcaaacttggttccaatgcgctaccccttgccttagcccatgtgggtgccacggtgcgcaatggcttttccaccccagaagactatctggcgctcttggaagagcaacagacaagggaaacacaagcagatccttcgcaagatttacaaaggttggcctttgaagtggctatcgcacaaattcgaaaacaaaaagatcagccatccaaggatgcacacaaactcctcaacgctttcgtctttttccccaatagacacatgtctttggagacagcaacaaaagcaatcatcacatccaggactattggcggggagcagcgacggagataccacaagagatatcccacatcaaaactcatcagacggaatgggaaagcctacaacacttctcaatccacatctcgtcggcaaagctcggattctgttgccctttcacgagttcactgggcgatcatggagctcctcgatatttccgcggttatatatcacccatcaagtggtacatactcgatggaagctgtcttgaaaagctggatcgcagacagcttaggtcaatctgagcgcgaagtttggaaaaacttagccggcatgatagccccgcaaaaggcgtccaaagaatccctttgatagttttttgacagaatttccttgttccggatttagtttgttgtgttttcccttcttttcttcagtgtgagttggttatatagtcgaatctcataatcctatcttctagtttttccaatcttccagctgtgacgagccaagtcttgcaaagatggaagagtgcatcaattcaaaataactaagataggggagaaagaagaagcaaggtgcaaagtgggaaacagccagttcttatagctgaccactttgtagacaatgtaaacaaccaaagaaacaaacaagcaaacgttgcgatcgtaacaccagccttcattcttggattcacccatttacctagatatctgcctgatgagacttgaacttttctcaaaccttcttttcatttattgaagatacgaaggtgtatagcggccaacagccatgcctgattttaatggtttttacggagcccgttgatcaattagtcaacaatagtcttgtgcaagggatttctcatagtcaggaacattttatatttcataccagtaattagtcgtcgcagagcaaagcgacttattctgacttctaatgctacgcaaagtatgactgtagaagctctgggaaagataatgatggttcgttctctaggtatggaccgtcgggatatgcccgagaggcccacgtgaccgtatgatcacaatctaaccaaattaggcctagtctatatttattctgccaaaggacatttcaccgcatagtttcccatgaacttcgaccccagtgaagaagaggatgttcacatgacatcgagattatgattcattgttgctttgcttcactccgcaaaaagtataggagctagttttcttgaagttgctgttatataagccattcatggaggcatcttaggcacctcaccaatgaccaatagcgaaaacaagaatagactccaccctctagggcttcgaagagccactgctcacaagacttctatatccttccccgccccgttgctttcatctcttaaacgcatcgagtggaactaacttttaaataaggatcatacgggatttcggctataccatgctgcaagtgagagtgccacgaaaaggtctagcctatagtgatgtctgagtaccatgcacttcccggtgatgtgtccaatttcctccagtagcaatttccgtctgccgcctcttgcgtaaataagattttataccccacgccaacaggtctaccccgcaaaattactatttagagcgctgatagtgcggggatagtagactaatgcactgagagaacgccacaatataggctgaatcatgtttcccggccaatccgaatctgagtgaatcataatatcacttcacttcattagactctgttatgtacggttctttagagtttgaagcaattaccgattattccgcaacaaattttgggaagagaaacagctaaaaatatggcattgaacgcagattcgttccctggtatacaattccgtaagccagggatatgtacatataaatgggtatagctagtaacgtaggataatatcgagagaactaatattctcgtcttttgccggatgagttcaacaaactacttttcatcccccacgcagacgttccttgaccataccccgcctaggagaatgggggtaaagggatagcaaagattcctggagatattttcctcgtatagaatctgtaagagattggtctcggcaatcaaatgagctgatgccagccgtacatgaaatgcggggaacttcacagaaagcgcttcagggaggtattggctttgggctgtttgagatagtcaacctgaaagataggacataatgatcagcagtttctctttcaatgtgctgcaatggtcatgtttttgttattctcaacatgctgatacagtgtgtttgactggacagagctggacaacacattacttggagtgcgttggatcaacgtactttttgacaaagatgagtctgatgttagccaccctccagtacttgaactctgtctccgcgcgcggggtcaatgtagaaggctattggctgtgcatatgggttgagatggggaaattgcctctgtagatacttccacgggcacacaagcacagctatataaggcccctctggtaggtcccatcagaagtctacttattccctcgagcactttcttcataatcattctcaattgctatattgtcaacatattcagagttatgactatcccagacgaagttgatatcatcatctgcggtggcggcagctcgggatgtgtccctgcgggccgcctcgcgaatcttgatcacaacctgtctgttttgttgattgaggcaggcgaggataacttgaacaatcaatggtgagaatgccgaggctaccagtcttaatgaacgtattctcatttcaacctagggtgtaccgcccgggtatatacccgaacaacatgaagcttgattcaaagacggcatcattctatcactccaggccatctgagcatttagatggtcgccaggctattgttccatgtgccaacattcttggaggtggcagttctatcaactttatggtaagtgatacctatctgacagtttgactcagtgatcctaagctgaatacattaaagatgtataccagagcatccgcgtccgattatgacgactttcaagcaaagggttggacaaccaaggaacttcttccattgatgaggaagcacgaaacataccaacgtgcgagcaataacccggaattgcatggcactgacggacccatcaaggtttcatttgggaactatacgtatccgatcaagaatgacttccttcgtgctgctgagacgcaaggaattccattcactgatgacctgcaagacttgaaaactgcgtacgagctccacgatagatctcctattttatcttactaacgaagagtcgtaatgttacagccacggttcggaacactggttgaagtggatcaaccgtgatacaggtaagaacgaaggtccaactttgcatcggtatcattacctctctcacactcagtattaggacgacgaagtgatgcagcccacgcctatgtccacagcacccgagccaagcataataatctccatctccaatgcaataccaaagttgagaaggtgattgttgaaaatggtcgtgccgtgggagttgtgacagtcccaactaagcctcttgacggcggagagccagttcgcagggtcttcaaggcccgaaagcaaattattattagctcgggtacactgagttctccactgattctccagcggtctggctttggtgatcctgagaagctgcgccgggctggggtcaagcccctggtcaacctaccaggcgtcggccgaaacttccaggaccactaccttactttctccgtttatcgcgctaagcccgacgtcgagtcctttgacgacttcattcgtggagatcccaaagttcaaaaaaaggtcttcgatgaatgggataagaagggcaccggtccattggccactaacggtatcgatgccggggtcaagattcggcctacggagcaagagctcggcgagatgaagaagtggcctaccccagactttacagaggggtatgagtcgtatttcaggaacaagcctgataagcctgtcatgcattactcgatcatttctgggtaagcatctcattcgcttcgttttgaatgccacgaggctaacccacggatagctggttcggagaccacatgcacatgcctccgggcaagttctttaccatgttccatttcctggtatggttcaaagtcaccaaatcagatcagccaaagctgacaacataataggaataccccttctcgcgtggtcacacccacatccagtcggctgacccttacgaagtcccggactttgatgcaggtttcatgaatgacaaacgtgacatggcacctctggtctggggatatattaaatctcgtgagaccgcccggcgcatgggttcgtacgctggagaggtcactgccatgcatcctcagttcgccttcaactcatcggcacgggcgcaagatatggatttggccactaccaaggcatatgccggctccaaccatatttctgctggtattcaacacggtatagtcttcctttccagtcgagttatcccgtccgtctagctaatcaaataatataggttcttggaccactccattggaacccggaaagcagccttcggcttcaactctcaactccaatagacacgaagctcgtccttcgctggagtacaccaatgaagatatccagcacattgagaagtggagtaagtatcaagcatagtaattggtagccccggatcatattgtctaacgcttttgctgcagtttcccgccacgttgagacaacttggcattgccttggcacatgcagtatggctccgcgagagggtaattccattgcaccccatggaggtgtcgttgacgagcgcctcaatgtgcatggtgtcaagggcctcaaggtttgcgacttgtctatctgccccgacaatgtgggctgcaacactttcagcgtgagtgttatgtttgttggttactctgggtttggccaaatactgactattatatccgatagaccgctctccttatcggtgaaaagtgcgcagtcttggttgcggaggaccttggctattctggggccgatctggatatgaaggtccctacttaccatgctccagcagaattctccaatctttctcgcctttgagtttcttttttgacgtgaaccgaagaacatgttctaggatatttcattctattcggcgagaagaagttccgtcctcattgtcaaattgaattaacatagtcatttcactgaacagttaatctgaaaataaagaaccaggtaaaccgacttatattagctaaacgtcatagaggaattcagaaacgagaggaagtggagatagacagttgaagggaagatggcatttgtgatgtgtatgtatgccttcggccgctagtgttggtgcctcagtttagtctagaccaggtaactagccgtcttacagtactcataccataccatcccacggctaacaactgttagttgactatggacatcttccaaggttatgtagttactagcccccgactccctactaggaagttagtaggaactatgtaccagtactaatctagtgatagctgactggtaaacaaaactttattttcctaggccaagtacaatatatgactgttcataagttttaacagcccctagccccacacccctgatttatataatattctgcctatctaaaacaccataatagtacagagtaagtaggggtgacggcgaaaagaccacgattgtgcgtggtcttttgaggggaaatcgtggtcctttcacccagcgctcgcgttagagcattgaatataatactagccaagttaggcttagcgcccttataggagtaagtatttatcatatatcaacgccccaaatcaaaagcggtaaggcgtgggcggcaaggcagataattaaatcggtgaatgccaagacggcaaaacaatcggccgcatgacaggcgaaggggcgcttcatctccaatctcgagctcccctgcagctgacaatccggaaaaaggagaccagcagtctgatatgttccgagtcttgcggcgattgggagtcccttcgccaatcattcagcattgtcgatttcgttgcccatctcgaccattatccgagatgggaaacaagaacagcgcaccttcgccacatacctggctcgacagcacatccccaggaacagatttgcaagaactgactcgtcgttagtagcttacactcaccggaattgactaacaagttagtatgtcactgactttgtattgtaggacatgatccgcattcgtattccggtggaagatggctcaatcgggacgagctcgagcgaaactctcgccacgttatatttgacttctcagcgctgtgtgagcgggctgttcacatatgtccaggagccactagcattctcaattatgagaagcgagaaggtggattcaataaagtcttccttttaacaatggacaatggaccttgtgttgtggcaagggtacctaccggtattactggcccgccaaggttaacaaccaactctgaagttgcaacgataacttattgtaaggctaagccgcatctcctttcattaagggtatggctgatatgcttacgaatttatgtctgtatagtacaatccaagatatcgcttccaataccgaaaattctcgactggaatgataatccttccaatccaactggaactgaatatattatccaggagcatgtgacaggtattcaattacatcaacagtggcacaaaatgaacccggaacaacatatgctatgtaccaaagcacttttattaacaatgaaaaagatggcttctatagacttcccggcctatggaagtctatacttcgcagatgcgcctctagactcagactcaaagattccctttgagcagggcttctgtgtgggaccacattacagtccggttttctggaaccgaaatccaggggaacatgaactctactatggcccaagccccaattgcggaccttggagagatctcacaagttattatcgaggtttgatagataccggtttttctcgtttgcccaaagaagccgtcaatgatcgcaagcttctcccatatcaaggatcaattcaagatcacatccgtatattgaaaataagtcgagaggtaatacaaaagttgattgaagataaatgcattcaggacgctgctataccagctctgcttcacccggattttcacaagaggaatatctacgtctctgccgaagaactaaccgttattactggcctgatagattggcaatcaaccagcattaagcccgcttttatgtatgccaatgagacacctgatttcgctgcactcccaaggatccccgaggaagatccactcgaaaatgaacaaaatgaaacggaaatttttggacaaaaggaacaagaattaaaagatgtatctgtctgttatcagacatatgatgtggttatgacagcccttgttcctaagcttcgtcctgtaagattacttgatccgactctttttcgactcttccactactgtcacacaacttggagagactccgctgtcgctgtccgccaagagttaattgagctttcagctcgctgggtggaacttgggctagagcgctcgtgtccatattcccccacagaagcggaattgaagcagcatgctcgagactatgaagattttgaggctgttcaagcacttaagtcatggctaagagacaaccttgatacaaattctgacgggtggatcccgaatgatatatgggacactgcgagggttgctcatcgcacagcgtatgatgaatggatacagactgccaaagaagccgagtcgcgtggcgaagatatgacagtagcaaaggcggacaagatgtggccatttgatgctagatagaaaccaggggaaggcaatcaaaaagtcagctcactgtctctagtgcctagtctaaacccagtccagcccttacgttagtttttttacgttaggatatgacggcctgatgtttgtttctgtctggcgaggcattttttaagcaaatctcgccagttcctaggagtaagcagactgtccctgggaccagcatgagtattttccgcgggactgtccagtaagtctcttcgccagatcggaaacggcaaaactaactcgaaaagacaattcatagtccttaatttatttacattgtggtttggtgcaagagaaaacgagggagtggtctaagttcgattaggatggcatttcttacgtggcatccgccaaagaacgcctctgtttcttgagcgtcgtgctccagtacacctgtatggaccctttactcctcccggcgaatttctgtgcaaactgtctcgtgacctccgaccaagcaagattctgttccaagaattagtcttggcacatcatcaatacattgtgttccctccaaaaaggccttggtatcttacccggttgacaggccttacacctgcataacgtatacctttacattacccattgttctataactcgagacaaaggatgatacacagaagagtggactaatataaagatatactacctctatctccagtctatatgacctattcctatttcttcttctttttttctgtctagtcctctatactaatcgattgtaaagttaataattttagtcataaggcatccagtcaattgagctctactaaccagtcattccataactaatagattaataatagaccagccggctaatatatccgtaaggcagaggcatagttcagcgtagtagaccaaaggcaaaaataccttatatcgagtatattcggcgattctatatatagaaaaggggataggcgaggcaaagctacatacagagcgctcgagaggtcgaacgagggcaaaggactagtcatttcgtgccggtaaccgagggggcggtagggctcggcgagctagatcaatagcaaaaatgccttactggcaggacgcatataggatgcagatagcaggaaagggaccgtaacgggcgaaacgttcagcgagtaacagtcggggcgatgaaggcaactttatagaaacacgcacggcgatatcagtcatgtggaaggagctagacccaaagaggcacgctaaaccgaaattggtaattcgccgtcaccgcagagtacggcgtataccagcctggtgtgtggcggtatagaatgtataggaaggcggtatataggtggggctttagggactgttaaaaactcatgaacagtcactgtactcctacatctgcagatgtatcaaaaatacatggattaaactctaatgcgtcaggtcagtacggagtacttgtaccagaatctattgtcggggttcttatttcttaacaacaaccatgtctgcccatctccgcgagatctctgaaaattccgtggcttccaacgacacagagttgtctgaagatgctcgtctagcgagagccacagaagaaatgttagcagtcacagatgctgcaacacaagatcaagacatacttcgacggaccctgagcgtgcattctgtcatatcaagctctctaagcttcgcagagcgtatgcagcgggcgaaatggtttcagagtgctgcgctagttgtgatcgggcgaggaacatgcggcacggtctttgagattcccggaacaaaatctgcatacaaaaaaggcagcgataagcactcgttgtggaacgacgcaaatctgaccaacattgcctgccgtgcagtgacagagaccaagacttctcttcaggaaatattcccgaatgtctcgattcctcgtgtgcctgaggtgactgggtggatcagtcagaatgacttggagaactggtggctacagaatttgtcacgatttccagatgatactcaaactggatatattttccaagtccagcggatcctgccgcttcccaagccctcccgtgaagctctcattcgcctctattttccgaagaaattgcgccgttctgcataccaagacccggataataaggcatgtcttgttcgaccataccttgggcagcgaagaggagagtgggaattttctagtccagtactcagccttcagaactttcctctttatctcgatcagatagaggaactccagttagaagctactcaattctctgaagagatggctgttgggctggctattatccactggagggctttcttagacggtatggacatggaattcgtactcggtagtgcgacagcagatggagaacttcccaccgttgttgagaacttcaagacggtgaaaccctttgagacccctgctggtgatttcaaaagacggcaggtgcatctatggatgcttgacttcgataaagctgaccagcttaacctaaaggagagctggaagtcttgctgcgataagatggtcacagctgtgacagcgaatgacccctatttccccaacccagcagccacgggaactctcgaacacaagttgtgggatacatttgaacacgcttatcttcttgctgcgtctaatcttctgcatatacagagagggttgccaaagaaggcgaataaatacccagctttatttttgaaagcatgggagaagaaagctacagaactggcaaaggacacagagggtaattttgtcgaatttgggtaaaatcgggttttatgaatgacgccttttgctgcagcccacttcgggctgtctttattctgaaactggttgatctcggctgtttcgccacaatttcactgtgattagcgcgctttttcctgacaaccgagatgattggaacttcacttatattttacacagaatggtcggaagccgtcaagcctcctgttggggtagatacccctatggaccaattctacgcacgagagcacgttaacccggccagcattgactttctgtttgaaacagtacctattgatatccatatgacgaagctttgtatatattaatgctccttcttttattaatagatcaacggtctgctggttatctgagcgttcttggagtgcccggcgttggggaattgattcgaagcgtcgaatcgctccacctacttccaagcagtgaatagcatgattgtatcactgcttagcttatatgcatgtcggtttacacattttgtatctctacccgatatggtgaaaagtagtgacgacggagtgcgcacaaacgcaaagtagtctccgtacaacaacactgcgatggaatttattttcctttacagcacacctgtttatattctgcggcttatacttgcttccgaatattaactttaatcattcatgtcttctctattgggagcacgctgttagctgccagcaaccctaccacggcgcttgcccagtctatatccaaatcaaacgtctctaaccaaactgggacgcgtttcttgaaaaacccggcatggatgttaatctagctaggttttctaggccatctatgaaatctcttccaaatcgacaatagaagtatcctgatcccttgatccacgtcgcactggtactagctcgaccccccatgcaatccgtgcacaagcagttacaaacttcggtacaatacctcctagattgaccatctgctcaattccttgccgcccaccatttatttgagcatgttagtcaaagcagattactgtccgatatgtcaatctgacggggtggctacaatgtgttcgtggattcggtacgtcatctcgatgtcattttatgccaacttctgttctgttattttgccaaatataaaaggtcggggggtttgcaagtttccatttcgatgatttatgatagtctcggttcctaaccagcctatatcctgtcacaatgccttctaagaaagttctcattgtcctcagtgacgcgcactctttccctctgaaaaagacccgcggacacgatgctggcaaggttgtcgagcagccttcgggctttttcctccaagagctcacaaagccgttacacaaaatactcgacgcaggccatgaggtgacattcgcttcaccgaaaggtcatgaacccgccccagacccaaacagcgaaacgctcattgcaaatgccggcaacttctatgaacgtcaacgcgcaaacgatcttcttgaacgcatgaaacgcgagaatgggttcagtaggccgcgaccattcagtactatcagtaacagtgagttggccaccttcgcggctgtcttcatcccaggcggacacgcaccgcttgaagatctgggagaggatgcagaactgggacgaattctgcgttatttccatcaggagaacaagccaacggctgtgatttgtcatgggccttacgccttgttgagtacgaagaaggcgggagatgggtcatttgtttatgatgggtacaaaattacgtcgtggagcgatgtggaagagaatattatggagacattatggggtggggaggtcgagaaggttgaatcggcattgaggaatgaaggtgcagtcatggtggagggtgtacatgaaataaccggcggtaccacgttggatcgagagctggtgtctgcaggtaatcctttggcggccaatgcccttggtgatcggtttgtgcgaatgatcagtgtataatatcttgttttccatctggcttgggtttggctcattatcttggggctataatcaagttttatggctagcgtaagtgtaagcttggtacaattccttggaaacaaatccgggaggctacaatgatgtaacaattaaagcacacctgagctcatatactgctctagttcaccaaattcaactttcctttcattcatacttccaatatacctcgttttaagtattacttacctgtatccttatctttggaccttgagtatgaactacatccgccattcatttccatatgcagcaatgagacagcatatccgcccatctgtgggacttcgatcacctgggccggctttcagtcgaagatgtttcgccagcgaaaagccgagtggccaggcaaaaaacccccggtggttagtctccattttaacatatgctacattaattgcatctgacttacacttcatcgctctcaataggctactggtatcaattggtctcgggctaccaatatcaatctacctgtggcagagaggtgatacaaagaagcctagcagcaagcctcatacacagccacgtggagcaaaccaagagtatagtcaggaatcagaggccacccaggttggaggacagaatatcaaatcgggatcttctggtggtgatgtggtttgttattccttctcttattgtgttgtcagggcctggttcgcgttatcatcatttaacgatccagggtattgggagaatgcatatctaactttcacatagcctcgaggcatgggtgcgcccaatggccccggaagcatatcagccaagcaggaaggcctctctaatgcggataccatgaacccatatgtgaacgaaccaggtaagagtaaaaagggcgagggtgagacagacagtgtgaaagcaaaagggaccattaggccgggtagacctcaggtgtagtctgcgctaaaacctatcgtcaccggtcttgaaatttaatatgcgcgctatatgtattgctttatgattttgttaggttacctcgcatcgcagagctatggaacaaaagtgggcgaagttgagccgttcttgaagatctctatcagtgatttccttttgccgttagactatcttcagggctccctacctatcaaatcatgagctagtagagcgaatgactctaagcggggcaccagtcaggcggggtacaaaagtcagcaatttttcgcccaacgcggtttacttcacttctcccactttccaaatattatcgctgaaacaacaaattacttcgatcaaggtaggctagggctgtgttttgtttgcatctctcgtggggaccttggtggttgctgactccccgtcagatctacttcatcaagtcatcaacaatgaacggacacgctgcctgccccaagtgcggtgtcgccgctgacggcactggaaagagctgtggcgcctgcggtgctgtatgttgattctgcactactgctgtgcgagcttatactaacccatattagacctgccctgtttaaagcatccctcgggtgtggatgaacagtatcggagttgagactgtttgtggcttagcgatggcataggaggagccagggcatgacttggatatcaatatgttcatagaaatgatatgatgacaacgataatgaactcaatatatccgaaaccaagtacgattgttatgtacgaaaacaatagaaacaacgtgaagacattcccctggaatgaaagaaatgtaagactgttcccagccgagaaacaaccatcaggatatagggtgcgtaataagaatacctccttgtctcgttcctcctaagccaacagccaggcctgggactccaaaatcaccatcactccagtagagggtcaccaacatcccacttcatcacggaccaactatacaccgcttagacaggtccagcggttttgcgccactgggaccaaacaccgatcaaactgctgacggtacctgcgataccgacgatgccatcgtcgaggttaacgataccaacggcagacaagggcgcagccagatcgcaaacatcggagatgagctgtatccgagcagcagagcgctccctaatcagattcttagcatgccatccatttttcattctgggaataagaaacccatacttctcaatcttcttagcctcaacaacaccctcgccctccttgcggtcaatagtcttctccttcgcctggagacggatgagagtgtagacaccagccacaacactgaaagccagcccagtgccccaagagcggtaggcggattgctgcacccgcttaacggaaggcagcttccgaatgccaaccacgtcgatgactgtgatggcgtcgagagtcaggtagctggcataaccgagctggcgaccgatggccaggtagcgcaggaccgggtcgacggggttcttgttatcgaaagcgacggcggcagccttgagatgctcgaggaatttgccgagacgcataatcttgcgagtcgtgccgaactgcttcttcacggcattgtaggggtcgatcgcggactgcggcttgtttgtccggtataggtaccacgcatagaagcgggagaagtattgaattgtgcggagaagcttgtcgcggccggctacatgttgcatggattattagcttgagtggtcgggtgaggacggggagagctcagctgagcttctcggccgaatgctcgccacatggggtttttgctgcagccgtaatgcaaagtgggcgtcttttctttcgtgcacagatagaggcaagggatgttgctttttggactctggggatgtatcacgtaccggttgtcgcgacgaagcgtagccagtgcgccagcgcagggtggtagatgagagtgttagcgaccattttgtctgttgccaatgagaatgaagacaatgcaacttcgaacacctgaggatgaagatgtcaagaatcaaatgtgatagttcacaagggaaaagggagtcggtaattgaccggcgtctggggccggaagaccgacctcggctgatctcgtgtgtgtgggggaagatccggaggtaggatgtaatgtatttactattaatacgacattcatggcattttagcccctacttatcatgcaattctttgaaataccttgaaattcttcggtatttttcacatgagcctgcgtcatcccattctcccgacattcatctttatcttttatgctgaagacgaccttcggaccttatatacaaatccaaactacttccaattgcatccgggcacaatcttagccctttcagaatatatccctttagcattgtaatcttaacgatagttgtagttgttgtcagcattactctatcgccaaagggagagtggaaggggctatttgctacatccctggtttgagagacgacaggcatccaagatcggagtaatattggaaggggaccgtgcagtaaagctagagtaagtccggggtaaaacgccagaacacaaagagcaatgtcccaagtaccttcacatgttgcaagtcttcgggaatacacgaggataccaggaagcaacagtatcaaaatggctgcgactgttttacagtttaggatccggaccacggtagcagaaaaagaaaacgaagactggtacatagtggagccgttttatttgtgggtaatatcgaagtccccaacttgaattagattgtttgtcaaacaagtcaggagttcggcttctgtcttgcgaaatgcatcactggcagatcagaaaggatattccctcgttgctctcatacattcatgggtcgtgtcgcaagggcaaggggtgggtgggatatttcaagtcgcaagggccgggtagtcgctgtctcgtcaatggtatctcgtttactggttgtgcgatgccgcgtatggatggagtgtgtgggattaagtagggctggttgaaacacaacagcccaaaagggtgagcaggtatgtgttgggcgcggtagggctcggattactgttgttcgcgggtgtcggtctggcggttatggttgcccatttccgtggtatcgtagccattagcctcgagatagtcgcggaacctggcatcctctaaagtaatggtgtcctgagaaaaggtgagcatataaacaaggtactctatctgcaacagttcatacctggttaatctgcggcatcatgaaaagggccataaaagcggccaagatacacagtgagctggaaacgaagaacgggtcctggcctgcgcgggtcgcattgggtgcgttcttttgtataactggaatcacgtaggtgcccacaaaagccccgaccttcccgatagcagcagcatatgaatagtactggccacggatagcagtcgcgctggtcttggcggcgcagagaccgatgttgtccccgggtcccatttcaccgagagcagagaagattctggtttcaaagtattagcattggcaatcgctaacgtctaacaactctgttagtaaacttacccgaatacgacaacaaaggctgccacgttttctggggttgcaagccacttgtagcatccggccatgatgaacccaatgataccctggagcccaaccccaagggcaagggtgtagcgaggaccaatccagtcactcacgaaggctccaagggcggaacctggaatgtagaaagaattgaccacggtagtccaaccgaagctcttccacaagggagccttgtcacctaagatgatctgtagccaggctgaagaatagataccaaagctgtaggaagagaagtcgtagaggaaccagataatagaaacaacggcctatacatccaatcagttagttggttgaagtctgcaaaggcaacacgtcggtgggggttgttaccaagcgcttccaatagaatctaaacccgttagtcaacgagtccaagcagtggaaaatgttgtactcacttaataatcagcaaggtcggaaacttgtgcatgcgctcccggttgaattcctcgggctcattcatcttcagccgaaggtacatcaaactcagaggggggattactcccagccccagtgccacacgccagcaagcatgcagatgcttctcggtgaagatcaggacgagaatcatagacaccaaagcagcaaccacgaaaccgaaatcaatctgaaagttggtgaacatgataaaccagcgattgcgatggccgctcttgagctctccggtgttctctgcggcgccgactgacccagcagggtattctccgccaatgccaattcccaggaagaaacggtaggccgtcaaagcagcaagcatgccacccaggctgccgccagctccataggagccagcaccgagagctgcaaagacaaagaggataatggtggagatcatcaaagaccacttgcgtgaccagtgatcactagtgtatccgaatatcagcatacccaccacagtgccggcaaaaacaatggaagagacattctgttgggccgtcgatttggtgtattcatccccgtaaatctgttgcagcatagtaccgacgggaccaatgacctagatccaagtgtgtcagtaaagagcgagtagcattgaagctgtggggctgcatccacgaggacgaaacataacatacctggttcaagtaaccgtcagagaagagaccagcaccacaggcaatagtgggccaactccgttcccagcgccctttcttcgtctcgtcaagaggcggcagctcgacaagctgctcctcgaggggaccactgcccttctcaggcatctccttggagtaggactgatcctcggccattgcaagggtgaggaatagcaatgagcactttggctgtgtttacgcggcgagcttgagcttccctggaggcaaggatagcaaatttggcacgcgcccaacgatatttactgtcacgcgatcacaataacaagagccgcgtcgatcgaggggttcttattctctcaaccgaggaagaagagattagaagcagagagaaaagagagcgacacctacctagagggtaaaaaagattgtcaatccaaaagaatattaaaaatatattaataaaaacaagaaacgggaatagcatcactctaactcgcatggggacaagtaccgggtacctatcacagagtagcagcgcgcgcgttaagccaagtatcggagacctagtgggacccggtccccgagcttgatcattctaagcatttagctttgagaatttcagaagtaatatatttgtaggccaatgatagacaccataaatatcaaggtccattccctagccaatcgtgtgtccgtctagagtgaccggtcggggtaggttgcatccaacaacatagtcggccactccgcacgttctactcaccataaggcgatgagttgatatcggtatcaaagtgaacacgcggcttcctgttcgaatcagatatgcaaaccagttagttatctcaagggtgtggatgttgatagaagagtgcattttctacggcgcacgtccgttgatagttccccgtggaattgtggctacctatttgtgtggagtagtctcacatgaaaaagtttttgaggctgggatccaatttcctaaaacagcgagagatacatgctctaacctttgtttgctcaagctcaccaagcaggcaatggagcttcgaagggtttccatgatttccatgatttctaggcataaaacggttcagccctatgttgtatatcaccaccccatatcataaatcctcgggcttgagtcttgaacgtaatacaaacacatagttaaaccatgcagttgtaattataattgccttcttctagcccaagctaagacatggaattcctagaatctccagtctgaatcttcagccgatgcgagtactataacgctgagacaagtcagatatattacaaacatatatctctctcaaaagtgaggtataagagtagaaatatttctttggcataaagggacaaatataatttgaagcctatagatgcgaccggggtctagcacaagtccaacgtagattatcttagacgttcgaagggagaacgctaaagaaggctcggcacggagaaacattccgccagctgagctcgggctacggtgatgcaccttggcttgatctcatccccagacatcaccagctgccatctttcccctgctctattgcatcgttttttaacacttgtgggaatcctgtcagcatctccagtttcccatcgtcaccatggggtctgatccacagtacatcaagttccccaacctctccatcgcccaacatgtcttcaatctctccaacccagcatgcgcgccagctgttcagcagagctcattgaagaagctccaagaggttatcttggagaacaaaatggcccccttctaccggcatctagcccatcccactgaaggcatcttaaacaactccggcgaaggcgtaacacagcacccacacaatgggggaagctcagcgaagcctctcatcacgtccaatcttcttgcgtctcgcaaaacaccgctaaagttcgatttcccttgggacgagaatctctaccagtctctactagaggataacaagaaagaactggagaccttccagaaggaggaagacgatgcggaagaggctgctggggagactgaggtacaagctgcgcgcgggaagcgagctgagttctgggctcgcgtgggagataaggtgagaattcttcgtccatgttttgctaagcttcttggttttgttggctgacactagtattttcgataggacaaagctgtcgaatcccacgaagcgctcctcgaaaagaccggattcctgggcaccaagattgatctggtaatggctatgctccgcatcggactcttcttcggcgaccttctgtttgtgaacaagaccattgaacgagcagagaccttggtggagagtggtggagactgggaccgtagaaaccgtctcaaggcatacaaagggttgcatttgctcaccattcgctcttacagccttgccgctcccctccttctcgacagtctgtctaccttcacaagctacgaactttgcagctattcttcgctagtgatttactcagtgctcgcgggatccttgtccctcaagcgtgtggatttcaaggcgaaggtagtagatgcaccagagatcaaggccattcttggctctggggaggaccagctggctgctttgagtggggaaatctcctcaggcccaggtgcccgggatgaggagatgaaggatgcaactgcgtcactacccacacccgccggtgccaagaccgctgtcaacatctcatctttctcaacgggatccggtgtgccagtagaggctgaggtacctgttgatttcgcaccgctcgcaaacctggttaccagtctctacaacggcaactaccgctcgttctttgtggcactcgcggccgttgaggatcagttcctgacacaagaccggtatctacacgagcaccgggcctggtttgttcgtgagatgcgactgcgcgcctaccagcagcttctccagagctaccgtgtcgtggcgttgagtggtatggccaacgacttcggtgtgacggtagactacttggaccggtatgcgctgcctaaatttcttcaaatatcaagtcatttgctgaccataactacagggaccttgccaaatttatttcaaacaaccgcattgcatgcaccatcgatcgtgtcaatggtatcattgagacgaatcgaccagatgacaagaacaagcaatatgctgatgtggtgaagcacggtgactccttgattaccaaaatccagaagtacggccaggctgtgcgtcttcggggaagtgagcgaagctaaagtggtacatttacaaacttggaggcattcgaagcctcacaaccacaacctatgatcaactatgtatgcccgaatagacaatcttacttgccgcatgttctcaaccccaggccccgtagactatgacatgccacccatggcatgacatccatagacgatcagtcccttgactagaagtccacggttagatccttttagatccttcaaaggttaaacccccgcactgggcacggaaaatgggtcgacatcgggcaaccatctgacctgactttccctcggagaattatcgtcgatcgatcgtgttaccatgcatgaacgtacgcggtagttctcatcatcgaccaaataaccgccgtagccacgtcttccgtgcccaggtggtctccttgactctaaatagttcaacgtccttatcgtgatccgccggatgtggagaaatgctgactcacaggttcaccgccaaatggccaaggccattttttcctcccttcttctcccgatcgcaatcggacaatcacgacaggggttcgtgctaaagggacttttttaattgaccaatctaatccttgattgacgattcgtcgaaatgtcctggcaatataagctcgcatccagcgtgcgggcctttccgctacgggcacagactagccggccgcataatggcctcctatatcgcccggccgcacgtgccgctgtggggggtgtctctgccagttcaggtacgttggatcccgagatggagtttccggcaatccttcggtattgacccgttgttctgcggtataattactcgttttgaccgtatccgattctgtctccgcggcctttatatacttggatctcctcttagtttcggggatactagtctacttattctgaatctcactaacctccgggtcgaacagagtccatcatgactcagacagcctcatatagcgcgcagcgcaacctgtccaccccgacccctaagtgcctgaacgtcgataacatcaaccagaacgttagggatgctaagtacgccgtgcgcggtgaattggccgtcaaggctgagacctaccgtcagcgtctgattgatggcgacaagtccctgccatttgacagcgtcatcttcgccaacatcggaaaccctcagcagctcgatcaggtgcccatcaccttcttccgccaggtcctcagtctcgtcgagaacccattgttgttggagaacgccgaggtcctcaagaagtcatttggatataagcaggatgtgatcgaccgagcccaggttcttttggccaatgtgcagagcgttggcgcctacagccacagccagggtgccgcggggatccgggatagcgtcgccaagttcattgagaaacgtgatggtttccctgcaaacccccaggacctgtttttgacttcgggcgcctcgtccggtgtgaacaccatcttaaacgtcatctgcaacactcctagtaccggtatcctggtccccatccctcaataccctctttacaccgcaaccttgacgctgttgaatgcccgctgcgttccttacctcctcgacgaggagaaggcatggggtactgacgtcaacacgatcctcaagtccattgaggacgccaaggccgccaagaccgatgtgcgtgccgttgtcgtgatcaacccgggcaacccaactggtgcctctctgagcgctgaggacatcaagaatgtccttgatgtcgctgccgaggagagcttggtggtcatcgctgatgaggtgtaccaaaccaacgttttcaagggtgagtttatctccttcaagaagcgactgcgcgagctccagcaggagcagcccggcaaatacgacaacatcgagctggtctcgttgcacagtatctccaagggtatggtgggtgagtgtggccaccgcggtggctacttcgagcttgctggcttcgaccccttggtccaggagcagatctacaagctggtcagcattggcctgtgcccaccggtcaccgcacagtgccttctcgaatgcatggtcaaccctcccatcgagggtgatccaagcttcgagctctaccagcaggagtacaccgatatctcagaaggtctgcgcaagcgtgccttttccttgtacaacgccttccagcgcatggagggcgtccacctccaggagcctcaggtacgtattctagagttattcaattttttacgcatttcctaatcgtctcgacagggtgccatgtacctcttcccatctattcacctgcccgcaaaggccatcgaagccgccaaagccgagggccgtcccgctgatgagttctactgcttggccctgcttgacgccacgggtgtttgcgtcgtccctggctcgggcttcggccagaaggagaacactttccacttccgcacgaccttccttgcccctggcaccgactgggttgagcgcatcgtcaagttccacgccgagttcatggacaagtaccgatgaacatgtactaatgtacaaaaagccatgtaaatttgaaatgcccatccatcgagatcttcgagcgattggctggcaccatatattactctttgttcgtggttcttttcacgtctatacgaaatgggtttttggcatccatacatgtgtggcctctacgacgcaatgttttgaatatttgaatttggatatggatctggaatcggctcgcccccgatacctcatagactactgactccattgggcttgctattttccatactcgtttttgggtactctttctggcgtctgtgcatcgcattttgaatagtggtatacatttcccttgggggacatttgcatcgttcgctctatttgatatgggtactgcatatcgtgggttacgttttacagaaacgtattctgaaaattgattcattgattcataacaagttcttgtatctttcctggtcctgatttctagttggctaagagataactagacgaatgagagaagagtattagaaaaaagaattgtggcaggaagtgtcgaattccattttgttgataatgcaattatcaggttcagcaaatattaccgttcactctccgagtccaaaagagcaaagcaaagcatggtggtcgctccagagtgttacttcgggctgagtctgctgggactcgaggatatccgtgtcactttgagtgtgctcttgtccatccaactcgcccacttgttgagcctcgagtatctcaattttacgtgctttgagaccgagcagcgcgactttgtccatccgatttggcggaaatcgctgcttcccatccgctccccatgtgtaacctggttccccaggacgaagagctgtccaggcatctgtaagaccattggtctccacgaggacggcatcttcatccagaaccgggttgaagtcaccagcaaccagcccacggcctgcactacgcaaaaaagaggaaacaatagcgagttgccggggccggtgggaaggtttgatagccagagaatccagatggacgtttgcaaatcgtacccgggtagtagaagaagcgtctgtaggtgaagggacgaacagatcacaaaatagtgcatctcttccaaagtggctagggaacgccaccctccaaacaggccctagagcaaacctgctcgtctccgagccgtgtcgcgatccaaagcgcgtcttggataccaaggtcattgtcgtgaacgagtttctgcatggggtgttctcgtgcgcgcttgagaaccacgatccgcgaatgcgctcatcgctcaaaatcagtcgcaagccccgctgcgaaacttcttggagaaatatgatgtccactttggattccaggtgagtaatgaatgtgagaatttctgtgacgcgttcttgtgtcccatcggataatgcgtcaatattccaggtcaagagcaccatatcggatgatgtatcctcggcgcgctgtgactctgcatcttcatttgcatccactggatcccactgctgggagttgggatcgaactggtgccaggactggaattttggatctggcacgtcggctgggaggggtgtgtcatttttccaggacattatgcttgacctaacacgtacgtaaatatccatggtgagaatgaggctgactgtctaggtactcccgagggtgccttgaggttcaccttggaaggtgtggtcagtcttatgattagttaatggcgtctaactacgttgtgcctgaaaaggggaaaacaactagtgtatattcgactaagatgtgatggacaagagggagagagagaggaagagggagcggaactatctgatgatctgaacccacatgggtgaccgccttccggtcacccaacattagttaagcattaagcctcaggctgaccaggagtgacgtgtgtctacatggatgttgtaatataaccacatgtatgtatagattaatgatgattttcatgatgttggaatccctaatggcacagtggtctaacctaattaggacagatcaatcttaagtcggcccatgcgcggaggtctcctcgggatgtgatgtattgacgtcgaacatgcggatccgggccaggtggacggcaactggaatacgtcagtcgatattggttactccgcacgcgttccctgactctagtattgacagcaagagcattcttggggtatccgaaatacacgtgacataggactaacacatgctccctccgaactcccatcgttgtttaaacagtccatccattagctggccgttgcaggggtcgtaacacgcgggctatactagaagatacatgaactctcaaacatatacatctttcaggccaagaatatctgaagcttatttctttttgaacggcctaacgtatggttccataatttcgtgagtagctagtgaagtgatgtagcgggttgtacaaggggtatttctagtctacatgtctctctgaatgaggtcataaggaaacgcactacagtcggtcttatctaatgctctgttatgcctggccatctggattgcgccctgtacatgtatcttagtcgaagggccatcaccaaccaggatctatgatttgttagcggtatgttaggtaaaccaagagatgcagtcataattacctcgtcatgtgctaggaataggggtaacgcaagggtcgaatcactaatcggagagtgtatctctgaagatgatatagcctcccttagtgaccgcacacacgcgattttgtactgaagggcaagttgaacaaagtatggcccattatgtggtagatattgtgatagatggcgacatgacacaagaaagagaccattcaaagagctagcattggtagcagcaagttgcacgaagtgtttgtttaggtgctgtgtacagctttccggatggctaatctggctacgttgcgaagttgaacacggtacaacatttgccatgtctgcgctaggttagtcatcataatctgcttcttagaaggtccgtgagaagtagcggacttgcgagatacatcgacttcttctgacgtgataaagccctacttacagtagtctaagagaaaatcttcattcgaatttaggctcctggcaaaacttgcgaagggatctctccggtgagaccccaggaagcccagagggcttgtgatgacggatatcgctatctcggcggccgctgtggagaatggcaggctttcgtcttccgagccactgatagttttgattgcatggtactcaatgactctctgtcgcctcgtcttggcatgtgccgatcgggctgcatgtgagtgaactcgtcgtcgcatttcagccgacgctacctcaggtactccgggtttggatgaatggatgaactggatttcacttcttgtgcgggacattgtggtcgtggttcagcgtctgaacgagagccactatgaattccaccatgagttgatgagatgcaaaagcgtgtaaaccttaaagccatgaccggacgttgcaggacgaacctcggagctgaaccaacgtggaggtatgcgtcatttgtcagcaatgaaggaccttgccaagacttgctccttcccgataaggaatagtgccacgtgcccactctactagcgtgccttattcctacatcgatcatcgctcatagcacaaacaatctcattgatagattgaccttttccttgttagtaaatcacctaccagaacttcttacacttgcctataagtagatatgcaagctttgtaagcactgaatgaccttgccaagacttgctctttccagataaggcatcccccactacttgccgttgcttcgaagccaggaaatgtccgtagcaacagccaaggagaaaaattgcattcgttctaatctcaaacaacttctacggaagcaagcgggtaatgaatagcttagcaatcaatcattcaaggtacttatataaagaagtgaccagccgcatagaggggtgaccatcttcaagagagtctccctattcactgctccgctgcatatccagtattcattatggtctctcctcctatgaaaagttttgtgtcattcaccaagacttggcacaatgatacttacccggccatctcacccacacgcccggagctttcgatggctgggaaaaacgttgtaatcacgggtggaggcacaggaattggaaaggcggccgccatcgccttcgcccaggccggtgccaaatcagtttccattatcgggcgcaggatcgaccgtctctacactgcagggcaggcgatcactgaagctaacccctcgactcaggtcgtcatgcagacaggcgacatcaccgacctcgcttctgtcaatgcagctttgggtgcgattgtgaaaaaggtcggcagcaacattgacatattcgtcagtaacgctggtatgcttccgaaagagggcccggtaattggctacccagaggctgaactccggcgcactttcgagatcaacaccatgggcactttccacgccttgaatgcgtttaccccattggccgcccctggcgcaaagttcttgtacacggcatcttctatcagtcactgggctcctctcccggaagtgccaggagtatggagctacgcggccacgaagggagcggcgctgaagatggtcgactactatgcttccgagcacccggacattcacgtcgcgagcttccatccaggcatcgttggcactgagatcaacccgaacatccccgtagggccagacacgggtgagtacctttgttttccaagccatcaggaagacagatggactgcagagtcatgctaacacaccttgcagtggagttgcctggacactttgttgtgtggcttgcgtcggatgaagctgcatttttgaggaacaagttgacctgggcaaactgggatgtggatgaactcataggtcgggcggaggagatccggacatcattcctgctaagggtctctctgaatggtgtgaacatgtagttgaagttctgttgtctgacgagttcgagagatgtgcaaccaagttcatagccacaaattttgataaaggaggcgatgttgattggttctcatcgacagaaatctgattctagtcctcggagttcaaaaaccaattcttcatgtgtatgggacaaggctttcaataaagctgacaggaacaatcgttagttaaagttaaggtaagggccggcaacaagactggaggatgactaaacagtgctgggcgggtgcagaataagtagtagtggtgttacaggttaagggctgctagacgactagcttatgctcatagtagtaactacaacaattacgatgagctccgatggtaggcaagatatatatacacggacccactacaaccctaaaaggagaataccagacaacgaggtaacagactaagactcatgacagaagtaattgatgacgacctgatgtgcaactaacaataaggcaaacttgtttactttattaaagaatatgcacggtcaggtgttctattgcttggtaaatgcttagcaactaagaccgagcttgaatggtctagtgataaactagtactagtcagctgcatctgatctcaacaaagggattgtcattgaacgcaatagtatacagattatacctcaatctgacatgtaactatgttgtactgtgacacaatacaaagaagcggtaagcattcgaagacaaaaaaacatactccgtacataccgggtaatgtctagcaactcctagctttccctttccgtttcaatgctcaccccttgccgctttttgatcactaagtagaattgagcacgcccctgagcagcctgacttgttcagtgagtattacataatcatataactattccacgaactgctgagaggttaagtaatacccacctcaataaaatgcaacagtataatggggctagtagttgaaacactcctaggagcacagagcctgaattggaaattgattgaccgaatataagtatcctttggcgtggttactgccttggcagaagccagatagccacgatggtcacatcgatgatgtccgtcctttgttgatggagcaaactgtgcatggcagccaaaccatcgtcccactttctgaggctgtctaacagtcggttacaaagccactctggggctatattgaagatgacgaccagaaatgggaacgtctggaaccagacaaatatcatttgaatggctcggatagcctcttggtatctggcaaaaaaagtccggtttgtcgagctgattccaacatctactgtagctataatccgtgataatatcaacagtcagggcgcgaaaggactccccctggtggctgtacaaggaatactggatcatgctgcacatcttatcggccttagcccagatgactttcttaaggctggggatagaccagcgtgagaagaaggggcttagagcggctcgacgggtcttatgaatatcgttatcaatgacattaaggaggataggagtcttgagagccgtgtcaatgggactatagtaaccaggctcctaaagaagcttgctaccaacgctgtaaatcctcccgtagttctctggaaagctaaagtggacctcattgggagggattggataacataagagcataagagcatggatgagatttccttccttacagtattggtgatagggaattgggagactggagagaccccagaggaatggaccggggatcttggctagtggatggaagtactggcaactgagacatggtcagcagacaaagcggccatagagctagtagcctgatactagagcccatagctcctgtaaacgattattgtggtggaatattacaggcccaggcagttgcaggtgggaactttcactctctatcgcttccaaagtctaggccagccatgcattaaaaggctaaatggcttgggctgggctcgcgacttgtccactcgcacttaaatgctgttaacgccgacattgcctgtaataatgccgggcgttgtgtctagaagaccgaagcagtggagagataccggtcatgggagcggattaattcatcgccgaaatgtctccgcggaccaagacccactctagtacccactccacggggcaagacccgctccgcggacgagccaccgatgatcttccgtgccctacctcgacgctttaaatagcagttggtgtgctgggttcattaaaagcacttcgctacaatatactatacacatatttgcccaatccgttgtatccttcaataatgcactcccgagacgcaaaattttcggaaaaagacattccagatttgagtggatatgtcgtgattgttactggaggtgagttctctctatattgtgttgtctgggaggccacacggtgaatactcactgaccttcattcagggaattctgggatcgggtatgaaactgcgcagcagcttgctatcaagaatgcgcgcgtttacattgcgggccgctcccaagagcgagttcaagaggctatccggcagatgtcgcagtcaaatgtaacgaagcagctagatctccgttttcttcagctggacctgcaagacttgaaatctgtcagggcagccgcactacgtttcatgacagaagagtcgcgcctagacattctgatcaacaacgctggcgtaggtggtctcctttcaagaaagccacggaatgtcagttctgacactaactatcaatgccccatcaggtcatgacggttccatacaaacttactgttgatggattcgagacacagtggcaggttaactatctggcgcctcatgtccttacatcaaccctgatgccgcttctcttgaaaactgcatcttcttccggctcttccgaccgtgtgcgcgttgtcaatgtctcgagtgatgcagcatttttcggtccgaagacattgttgctggacgacgtaaacatgaccgagacgaagggagtgatggaactgtggtatgtgcacacctggatgaatgaacccatgctctgttactaaatcctagaaggcaacggtatgggcactctaagcaagcgagtatccgggatgcgaaagagttgaacgatcgttacggttctcagggtaggttaccatcgacttgaggaacaactcccatgctgaacaatatacaggggttaccgcatactcgcttcatccgggtattgtccgatcgaatcttcagcggcatgatccgaccgtcattggcagcgtcgtgcgaactcttatgaaatttgcagctggtagcaccccgctagaaggggcgttgaattctcttttctgcgccaccagtccgaaggcgccgattatgggacaaggtcagtatttcgttccggtgggtaaattggactcccgagcagcaaattggatcaatgattcgaagaccaacaaaaagctttggcaacaaagtgaggatctgatcaagcgcttggtgtgacagtgggccactagtgcttaggtactcatctgagtttcatttgtcacgggggcatactaggatatagtatttttagtcattaattcaagttgcattactggtacgaacatgctaggttacggcccgtagtttctgccagcatcatcagctcaattccgcctatgaatcaggaaaggtgataaagttgggcgcacaccgcaacttcacttacattgaatcttacggcatggctggccaaatgtctccttgttcgtcaatgactagtgattcactcctcataggttgttccaggattcacgaaagttgagaatctgacgcggtacgagagcgttgaagaaacgtctcccagaggccctaataaatgcggagggtggtaagtgcaactggagcttgtagagcaaaatgggactcttagcaaaggagaatatcaagacgtacccaatcgacattattaggagtagcgagcattgcttctatcccttccagatatgaattttgcggcgagatttctactagaaggagggctgtgagacgtcatgttttgtgacaaagaaatccgactacggattgccgatatagaagactcaacgggatgaaatgggaagaacataccttcctgcaagaacgaaggatcgtacgagaagataggattttgaaggtccccaagcgattgaaagtccccaagggaactttcctgagattcttgggatgtgcaaactctctgtagcatagctgaaataagatccaggccgaattgggcttcagtggaactcgctttgaattctgcccaaaattgacgggagtttttgagggcttcaatcagctcctccgagcgataattcccaagattacggtcgtatgaactggaaggcgcatagccttcggaaccacgggagccaagttcaagacagacgatcatggatgcaagtaagaagtcatgctgctcaagagaagagataaaccatttgtctcgataaagaagaccaccagggtggacttctttgaaaatgttcatctggtgtgaaaggatggacattgccgcgtcgatgcaagaggatcgcgaataactgaatttggggtcttgataagcctttgtcatatggtgacgatgcaaaaagcaccgggctttctggaaaagcagttcaatattgtaacgccgaattagtaaatgagaaggcgttgtgacggatgcttcggacgaagtcatgcgaaaacggggtgggatggagctctgcacggcgagcaagcgtttatcaagagccatgacctcctcatatccctcgacccgaccgaggcaaacctcgttgaaaatagttcggaatacggacagaagttgagcttttgcaatcgtgtaagatacaggcgttagctcggtatggggccgcgagggtggcagtcgcatcgtgtctgcatcaaaatcttcgtcgatgaggttgtgtggaagctgagtatcacactgtgattcttgtatcatggaaggcaatccaagctgacatgaagtcaaggcatcaagttgtaaaattatcgcccagacacgacgtcgcatctcaccattgaaggtagaaatctgtgagtagtgctctgggtctcgatgatatcccatccgcatcgccagcctggtagcaatgccacaaagaacccatacgcccaagtgagcatctcgacgtcgaacatactcgttttggatgttgagcagcagcgcttccatagtgtgggctgtaggaatagtagaatatttggatatgatgagacattccgtggaacaccgttgaaaaacatccatggcattgcgcggactgcctaacccgttcggaaggtcatcttgtgatcgtacgtagaagaatacccccatggacatgataccgaaaagaagactcagccacggggcggagaagttgtggggttcaagccagaaacgggcatactgcagatagagttactttcacaggctgacgatactcataccaaaatgaaggtacctcttgtccaaaagtgggcttatgaatgatcactgcattcgcagttcgttagtaacttcaagtttagtggggaagaaattcgtaccagcagacggctcattcgaattgatgtaacgagataccagtctgtcagccacatccctcggggggatttcacatagtactgccgctagatccgagctagggtgtgtcccctcgaggagcattggccccccctcatgttggatttgacctggaaaatccaaaggttctgccgagtggtctcgatcgatatgctctctaatgcttgcaacctagatattgttactacgatgagctcctattgtaaagcctcctaggactttgacttagttctttacttcgttgcaaatcgctgcccagtgaatgccggagacatacaccacctgaccgctgtttgatatcatgtggccgggcttgacctcgatatcattcgactgtgcttggtcagatgcaacttgctcacggctttcaacggcgaaccccaattcctgaatattcgatggatcaacagcatcttgaatcggcgaccctggagcaacgcttgtaccgacaagatgctctaattggcgaatacgcgcagagagatgctggtttccatgtcttgtgtgagcagagttccggcttcgtaatacagtggcataaacgcagtcaacacctctcgtggcacaattaccgcacggctccttccgatcacatttcagtctaaccagaaattggtgagttgacttcattgacgataggccccgcacttacttccgttgccggcaagaagcgcaagagaggaatccacgagcaccttgcatagtttatagatcgagatatttaaccggactgaatcgcagggccactggagccgttgaggttccaaaggaatggagactcgcgtgggataggtcgcgtgagtgtcgtatctcgactaggtctctctaaaaacccacccacccacgcaaacggcccgttgggtcggtcttagtcagcagacccgtttgctggttgataagcgatgagtcggagttcatgtttctgaaccaggcaatcaagtagctaaatgtaggaatagcctcaggagttcattgtgtgttactgtattagatacaagtagactggtcgacagatatgtatgcacgtgatcctaggatatttaacacgtgttgtagttcagaggtatgattgtcattttgggggggaacatgcaatatatataacaatgagccaagttgatcaatcatcttgctcgtccgtatggacacctcgggaattgtttccgatgatgcggcttttaccactacaagacaataatattcagcattaaaaaccataagagccctacattgagtaaattccaagctcttggtggccgagtctgatctcagtagccgttatgtattatatagagtgagaaatactttgatccggctactatacggtctatacctacttatcgctgcggtgggcccggatcaattgaggactcaaggcccccaggccaatccttcggagttccgcgggacaacccagaaaagcagtgcagtcgtcaggcagtaggtacggagtactccgcggatgaacccaactgtacggagtactaccgactacgtcaggacgaatggatcggcctacttatcattatcgtccatggcatttgtttatatatctggactgatgtccgtagggtcaccatacgtacacatttcagctttgccaagcgaatattcactcgagctcgatgtctgaactaagcaccgcgccaactccatacttatcctcgtaacagaaaatagattatatctgagatcttgagctcgagacgctctgaattagaaaaaaagatgaaagcaatatcatgaaccggatggggttctccactccgtcctacgccttttcgtcatgacgtatctccttaataagatgtagtggtccaaacattgagggcagcagcgatactatcaacgaactaactatgtatcatagtataaacgaccttatgggggctaatcccttctgggtatagtctgcagtgggctgagcatcagtcattctacacgtgactgaactgagcatgatcactgatctgagtccgtgctgacatctactcagtgagcctgagcctgagtactcataaaagcggccgcagatcaaataggaaagccctacctggcagggaaaatccggtacgtatagtaacatacacacataccccggctgctccagtagaacctatgacctcagaagtaatccagctctatctctccagatccacaatgccttccctgttgtacatcctcaacccaaggcccacacatatgcaaggcgcataagcaaatccactcacatacacctcacgctatgttgtatgtacatattcggtaaccggctatctgtattaccgggtccaaccgattctactcgcacagcagaggtgcagcatacagtagtcacactgcagaccgcatcctcggacgaatgtcacacttaccttgccccaagccctgacttgcgtcgtcttggctaatgcttagccatggggtagcgccgatagggggtttcccggttccatgttgcacggtatgtacaaagtatattatgcaagtatgtccgtggttgcgttggatagatatatagctaggcggggagtgtacatacaaagcgtggaactgttcgtttctatttagggtagagtagtgtgatgtagtatatatgtatattgtagagaaataatttattgcttattagtgttaaatagttgtgcgatatacatagatgttgttcgactgttttagaatggcggggagagtctcggagtaagggatcgcgttacaactggatcattgggtacttagggcaagagggcaacctctagggcctaaaatactccgtatactccgtatactccgtacgacctgaccaatccacgagtcaatttgccgatgaggcagctgagtgtcactgggcgtagctcaggttttctcaccgctacatccccgctgcctggccgggatcctctttccatcgatcgttactactagtattttttgaagctgaattcacaaagtagtttatttggtattaaactatttacctagttgataggtaattggtgattagtgatatcatcggcttggggaggtatctcagctaccgtcctgtgttgccctatataataaaatatcgggtgcatacatccacaggcgaatcccagggtttgtgatccgcactgtgcatgcattgggtatcgttgtccgggggcgagtgcataaagaagaatcactcgagtcattatacatgtaagaagagaacaaatgagaaagaaattctatacaccagcgaaaagcaagcaaggagcaaaaaaaaagcgcatgtacggaagcaaaagccaaagaatgtacaagcacgtgcatgtctccaaatcgcaaacccctctagattggatggctatcaaggaaggaatctagactggctaatggaacaagacaaatcaggcatttatcatcatctctcatcatagtcatgaagacggtgtggaggtggtggtatattgccgcgagagagcaagccccgggacagaagaaccatagggggaatataatataagcaaggatcatcatcaaccactgtttcttactagacccaggattgttggaagaagttgtcgtccatgggcggggtggaactagcatcaaaaagaccgctagaccagataggaacggagtccggcggcggcggcgagggagcgctggtaatcggggccgacgtcatgggcttgtacgctggtatctgcgacatggtgtagatatcctgcgcagagacaggttttgactccacgctcatgctgacttgcagctggtgctccagcgcagcagtggactcattagtcgacttaagaaagtcatcgatgttgatcgagtccagctcgttggatgccaggagatgcgtctgaggtagaccaatcaacgaggatgcagagctgatgcggagatggtccatgtcagacgtttcgctcacgctgtgcagatcgtgcatgtcattgctagcatgacccaagcctggaagcgtcccaaactcgtcagtttccgaattgtctccggatgatgatggcggtggaagacccgaggagtacgcggtgtaatcgaagctggcatatgaaggagcttgcgtactggtggtgccaggcacgtcggagtatagagggaaacttgaccagtcgaccgagggagcaccgatgccagcagaccctaggggcatatcggaatctggcgaagtgaaggaacattctgggtaagattcttggaatgccatgcaggtgatcggagaattgctgctcgtggtcgggaaggaggcgaaagaggagacgtcaagtggaggaacactggtgacaatctgctccaggggaaatttgtccatggttgcaggggcagatatcgggttcgacagcgcatcatgggatcggtctaatgatggagcgggaggtgctggtgtaacgaagttgtcgaggtacgagtgatcgagaggggcaggtttcaaatcgtcttcggcgcccgaaagatgcgcgctgttgggagaaccatttcgcgacgtgtgttgtgaggtaggaaattcggatagggtgaaaggatccttaataaaggtcgactggcctagcggcaaatgatccaccgagcgacggggtaagtcggttgggtggtggacggaatgcgatcgcgggatcgtataaggcaatccacatttgtgagccatgtcattatgcttgtgggcaggtttatgatgaccgtcgcggaaaatcgtgagcgtcgattcagatttggtagacgtaagaggcggtttccgtggggtttcaattgtaagcgggggtggagggaaggcaagactggtttcaggcacagtatctaggtgttcttttttgagtgcacaaatgcagcgctggccatgacagcagccacagcgaccatgggaaatgccagtatggcagtcttccttcttcttcttttcgccgcaatcacactgggtgtgggttgtccgagacttgcgtaggccgcggcagtgagtacattgagagactgggcggccttttttgttgatgtgggtcaattggcggtctaaaggggggattagcatatatacacaaggttgagatagcgtcagattggcataccactatggtgacagctgctgactcggtgaccccggacgcaagcctcacaagcatacttttcaccatcgatgagcatcgctgcggtgttactgggaggtacacatgcgatgattcgcgagggataccggagaaaataaaagtttggaaataaaagagatcggttgaagagaccgaggtatcaagccgtcaaggcgattggcagcggctccttcgagagggccgggccgagtagaacaaaatgaacaaaagggtataatcgtatagtcgaaggtcccaatgcgcggtgttcacagaacgccggactagcagtgtagaatgccgctgagagccaccgcactgtcttcgattggaacagaaaacaaaaagaaatcgaaaatccaaagggtatctcaggcgcgaggtagagagagggagggggggtggtcagggatcggagagtaagagagagggagagagagggggggaccaagcctacgcaccgtttggcgccggccgttagacaggacaccaagtaccggtagtggcggccaagatgaaaagcgttcgataaaagaagacgttggacacgcaatgaggaagagaaaagaggaagggaagggaggcgggcagcagccgttaataacgggatggtatggaacgaggattttcgctgcgctactggtctttgtggggggccatactgacatgtatagagacgactggtattgtacttttacttggtttttactgcttttactgcttttcctgcgtttatttactggttttgaatgtaatggttgtacatgctgatatagaatgggctaacaggtggtaaattaactgtactattactccatatcacacaacagatgcttcttcggttctttgacctgaatccttctggactccacttacaggaaccatcgctgctaagaggttccaacgcacatcgtgagaatgaatttagtttttcttcttttaatctactagtcttgtttcctgttcctcgttctctattctcgctttttaaactttgcctttttttcacgcccaaactggcagccccaaccgggtgtatagtatgaccgaactcgtagccactacatggaatttcccttacaacatacacaaaaattggcgtctaatcttgacgaactcaccccacttagcaaaatatggacctaaatctggggccgcatacggagtatcccgactcatactctctcatacttacatatgaacattgtgtttgtgctacggtaaccctagttgctggggctgaatctattataggacataatgtttcaggggtgcgcttgagccaggtacatgaggaactttccataatccctgcaagtttccctagtttatcttttcatccatgtccttggcacacacaactagtaatggaaaatgataggaaagagaaaagcatccagtggaaggagtccacgtaggtgtgcatcaaaagttaatatcagattacgtgcgacaaataccgagtacatacaagtaccataccaaaatgcatgtcatagcgcaaaagcgggtcgatggcgtcagtgtccctgcttcgggcggcctgcagagagtttgggccctgatctgcatctttttacccgccaatcgctatcttgcggtggacactgggtttctttacgtggtattccgtatgtacaggttttgttcgtctttatccatctgtacagtacaacatattaaggttgaatcatctgatctaacatatgatgtatggagtcgaatttggttgaattgcattacgttgacctctaatcacccctttacatgattccacgtaaaaaaacggtgctctgacctcaactagcacatacaacatacatagctggttattgcccccgaaaaaaccagatccgggtaataataatagcgaatagcgagaaagtatgagatactcatactctttggtttgacatatctcaaatgaagaaatagcaactccaacttattttatggtaagcataccactattgacatcaggctggaatagcttgatttagaaaatcaactaaatcattcatcactctcaaactagttgtcgggtagatgcgaatctttctgtggccaattccatactaatatctgtctctgtccacaaagaagactcttgaatatatagggatgtagataacaacaacataggaacgtaagacccccactactcccactagttaagggtggacgagtagagtaatcaaggacttgtagcactaggttttcagaacgatgagtttatagtactatgaggaaaatcacctgactgatctcgcgcatcagatcaatatcagtgtgaacgagtccgatgacattcgacggtcttgagagcatgattgatactcactgccccctggaataaagtggcatggcatgggtgctaacatcgttttgtacgtggtagttcatccgaagccgaaggggaaatagtattaatccgttcgacacgcagaaacgaaaggccgtcctccgtgcgatcatcaaaaaagactcggggaagcaaacaactgtatatagcttcaaaataatatctaattcctttgaaacttctgtacaaatgttgttgcttaatgcggcgctctccgcgctagcccccttgaaaatcaccccccacgaaattttagttaaaacttcacttcttgcatctcgcgtcctacactatcttctctccatcccccggaggcccgctttgcccacaacccatcattttacttgaggttttcagtttcatcccacacaatgaactctcgcgagcagtctgatatgcctccggcgccttcttacccgtctcctaacggtgcgcagatggcgcagggtgtgccctcgtattatggcaaccgccaaatgaccaccgacgaactgctgtccgcagaactttcgcgtgatgcgtccggtccaggtctcggcgaaacaaacaacggtgttcatcatggccagtccatggtgttgggttcctcaaacgctgccgacatgggtcgaacctcgtcggaggatcaacaccagcatcagcacatgctccagttccccccaagtcaacaggttggcgtcgaccccaatcacgacttgagctatggcgaacagagtgcgcgcaaacgatcgaagatctcaagggcctgcgacgagtgccggcgaaagaaagtacgataataactcccccaaacgcgactgtgaaacctgaaaagctaagacgcgttttcttttacaggttcgatgcgatgcaagctcagaaaccggccttgaaacatgctccaactgcagacgcctcggcgttgtgtgccagttcagtcgcgtcccgatgaaacgcggccctagtaaagggtaggaacaacaagtgcaccactacaagaatcgccagcgctgacagagacacaggtatatcaaagaacttgccgagcgactccatactctagagaaccagatgcaaccagggatcgtgcagcctgacgtaccctaccagtccatgaacgaggtatcgctaccgagagggtaccaggatttcgcttcgccggtggaatcgacctcgggcaatcgcaagaggacttactcggtcttcgaaggtcttcccagttcctcgtttgcacaaccttctttcaacgctcgcgtatcgcaaaatgccttcgacgcgtccgagacagcggcagacccgtacaacccagccgtcgccaacggtagcgcaccgagacctggtaatctgttctggagccccacgggtcatgagaatgacctcccaagcggccttgagatgacggatttgccaaagcatgaaggtgatgatgatatgacaccggtgactttggatgaaggagctcttgatgcgtacgtgcaatgtgtaatcctcgtaattacgagaaactaacctcataccggattgcagttactatcagaagattcacaccctgctgccaattcttccccacaccaaggagcgaacgttggagcttttgcaccaatgcaatcgcgaggcacaggaaattttctgccatgcgttgtacagcgttactcgcactgacatgtctcgtgtggctggcaatttcgagaagattaatggctttgataatgctcaggatctcctcatgttccacactcgccagccattgattatccatacaacccccgtcaacctaatctggcttcaatctcttttgctgatgatcatcgactgtgacacgcgtgggccggataattttgttctcaaagatggtatacccaagggcagcctagtccaagccgctaacaagctcggatacgatttggccaagagccaaggccagctcaagaacaagcgatctgtagatcccgacgtcgactcggatgccaatctcacccggcgaaactgggtgtctttggtcatcttggcccggtggtatgctatgagtgtggcagatgctaccgttctggggggtcatgagattggcggccgtgaagatgcaagggttgttggtcaaatcacaaccggaattgcgtgtatgttgatcttccttggtttacaattttactgtttcactgacccttttcgctccagcttactcgacattcctctcggagatggtcactttggtcaatgtcgaccacaacgtctgccagactaactccggcctgggtcgtatcatcggcgcgaacctagtctcgtctctggagcgtctagcggagatggaggacatattccagatccacgagctacccgagaactctaccactcgcccactttacgaaagcctccaagcacaactttactggaccgtccgtttgctcatcaagcgtcacgtctttgtatacagcccgtacgagatcatattctgcgcgcaggaggtaatcaacgagatgcacaagtcaaccatgcaatcccgcctcccatccccctttgatcttcacagtctcgcgctcgcttcaatgactcttctcgaggcgaccattctcccagaacacgcaagcgaatgctgggctaccctcgaaaaagttgaagagatcctcgactaccgctccaagcgtgcagcaaagggttccgagttcgacaatatcttcagcaccccggaatgggatgccaagatccgcatcttccttgagtggcgccgtatcaagtcccaggagagccagctccaggaagctgagctcggcggtctcgccaagtcccagcagcctgtgatgggccccaatgagcagcgttctcttcagcaccttgctgatcttgctgtcggcgccgagggctcggttggtcagaacgcgccgtccacgcccccgccaggtatttccaatgagcatggcgaaacggagcagaatatcgctcctcagttggcccagtcgcagagcggatcgggtcgtgttgttgttgacttcactatgctcactaaggagggctacctgaacgtcttctctgggttgatctaccgtcgtacacgttgagttgtttcgcgatcaagccccgtcttctccgcttaatccttgtgtctactttttttgtctgaataaaggaggcccctcagaaatcgtttctcattatgtaatatttgcgttggctgggcttccctatggctcaggcttcgatgatatcttttatatcttatgttgtagtcgtttctcggtcaaaaagaggggatctagctcttgaatggaatatcgtttatatatgatctatatatgtatccaattccaggcgcgaggtggcttacccaaagagtttcgaaatttcgaaattaccggttcgatgcaaactcaacaaacaaggcgactgtcaattctctcctgcatctcgctgccgtttcaccacagactacgacttttaccaggggctgtctaaggctcggctgacgggaaagcctctatagtactgcgtagggttttccttatcccacctttacttacgaccacgctactattcctgttgctttgacctccccgtatagacactacctcaatgagtcaaatagctatgctaatcttgaatagttctttgctagtgtggaagtaccccacatggaggatgaaggctttgacaggccattcggatttatcgtcactggccaatatcttgctattctctatcacggcaacgacttcgagatatgcagagactaccatgcgcgtggtgctttgttctacctttccgacgacggagaaacgataattcataatcgcacatatgtcggcgctctcactgactatcccgactatgaaggagacgtattttacatccgcaatgggtcgcggtacctagcccaggacgggcagtggacggaccacacccatgacgctatcaaagtccaaattgacccagcgggagactatggcgatgccgaacctcccattcccccgtcaatttcaaatcctgtcgttgatccgggcaatcctatttccgcggacggagtcgatctttaccaccccgataaatggttttcgttatatcccattaccggcgatagtatctggtccggtgatgctggggagctggaaaccaagctatattttggtggcaacccgtacagtgatgggaggtgttttcagctctctgaacatgatgggaagacacggatccgctcctatgagggtaaatatctggtcgttctgatggaacctagtattgccgcgtacctggatgaaggctgcaagggacatactaggttcgatcgatgttctcggtgcaagctccattacactattggatatagttccgagccggacgggggtctttttttagttccgaggggtctgccaagcatgtttgtcctgaatgatggtcttttctactataaagtcgatgttcttaagggtagttattcagaggtaaagcgcgttgaagacatggatgatgcgtcatttttccagtttgtcgcctgaacatcacatacacaatgaagatcgagttgattttctccatatagcatgacatgacaagacaagacatgacatggcatgttatgatatgatataaactaggaaaataagatactaggaacataagatacggtattccagagaacaagcgaatagcagtcatccctcattgcctttgtccgaatgcaaatcgtctccatgttccatctacatcctcgcacagagtcatgaaattgtcatcgtcaatcaactcggacatccagttctcgagaaaggcaatgcgctcagctgttggtgaagaaagataccggacaagatggtcttcggtcatggtgggtgcttcatcgtttggattgctagccggattatggttgcagttcaagttagtttgcttattctgggtttgcgatgtatcctgaacgccaggtacttgagatatctgttcggcggattcacagaccggagctgtgttttgggaagcagggggctcttcatagagcaataatggctggctcgcctcggggcaagcatttgtttgggacaagagttgggaatccggatcgggcaaattataatgatcattgggttcgacctcaagatgaggtggatgaggttctgggtctttgtttggcctagtgggttgcgaaattggcggcggagctgactggggatgcttctgtgctgctcgagacaagcttgcagcgcgcggctttcttgcagttggctttgagaagggcagatctcgcttaggagggagcatctggtttaactggtcgacgtcatggattgcagatatggtggaaagctgagagcttcgtggctcgggttcctggtttgagatgtgtgcgagagcagatgcatgcagtggttgagatagatctaccggtcccatgctttgggatgggaggttgagagctggcacagggcccaatctggacacagggtgtgaaatagtacttgcgggagaagatgctcgaatgggtgctatcgaagtcaaagtgtgagatcgctgctcgagcgatggtcagaggaatcgttacatacttgtccttccagaccccaacgctcccgtggggtagaagtggactccattgctgctagttgaagttgccgccgtatttgcagtccggggggcaattgaagagagatgccccgacgcccatgatgacactgaagggagtcgttgtattgctgggactggtattttgccttctgtcaatggacagttgatttcgcctagaagagtcaaggccatgaagtagtcacgctctgttgtgaacttgatctgaaaccgacgaatctgcagagttacaggacagtttagttaggaatcaccacccaaattgatatcagaatatacacacatgtgtttcaccgtgaggatacttgattgcaagacaaggcgactttactacgacagcaaagtgtgaccttgggggtggaataagccgggcctgcattcctgccatgcgagtgaagaatacgagatcaagctgctcctaaattcgataacccagatgttcagcattactgactcttgtcaagctttatgtgtaagtgaagtgtaccaggataccatcacctcgaaccactttctgaatcatcctcgatggcacagatccggaatcgagaaacttctcaaagatgcaagcgaggtctccattcccagggacatgattccaggtcaatggaccgacatggtcgatggcagtggttgtatgagagaacttggcaatggctaagcgaaggacctgaggagggatgatgggtggctgtagatgctgcatcctatagactaagagcaattcacaaagagtaaaggccgaggagttatcaatggatataatatagatgaagaatgagcgtggtggctagtgaaatgatgttcatgatgagggcgagattgagagaactctccgtcagcactcccactaattagcattgcccaccccattaccatgtataactagagtgtagctaaaccacttgctgtaagattaatgtatgtctttccttgtatctcattccagaatatttaaattcttgaaagtcatgttgagactcgaaaagatatgactgttgccctaggaacactctatgtaaaatttgtcagcttcgttggttgaatcattccaaaagaaaacatgagcatagaatacaatcaggacatgaagactgatcattgtttctattgtttctattgtgtctgtggacaaaataacaattattgaagaatgtgacagcctgaggccccaatacatacatcgctgagtcatcaataggaacaaccaataatccgataacgcgctctggacaagcgcggacttttggctgatcagtgccgttgatcgcaagcccagctctagccctccagggccgcaaggcattgacgattattttatctttgaaacgtatcgctgactttgatcgccgacgcgcaaatttactactcccttcaaacagccgttgctgctgagcactttgctcttttcaccgtcgcatccagtgttctcaggtttgaacgcgcgaaacctgcgactcaagccgagccacagtcactggccgtcgccatcacctctttcggtcagaatcaacattctatcgcctttgtactcagaccctgaagcagccccacaaagtcgcaagtttgacgcccctgcaatttttcctgctcgactcgtttgcacataaagacgtatcaagggcagcattcctcgagccgtctcttcaaagtctttgatcttgggaccagaggatcttgtctccgattttctctcggattctcgaggtcaagtttgttgatctcatccgttgcaagaaccgaaccaccccctgcgtttgaaaacgtgaacggcgcaacgctgtcgcgttcctttagcagcaccatgtctgcctctacccctcgcacctcgctgcgacgtaagactgccatctctcagcagacaggtgtggtacctatactaacaccacccacagagggcttacgccatgctccaaaaatcaaccaacccttcatccccgatacagcccctgcccgtcgatcacacacccatcatggactcacatcaccacaaccgccgaccagcccccatcatgtaaacatgaatccggccgccaatccccaaagcgcgcagttcgcagtcgatagctgggaaggaaaagacaatcgacaggtgcccatgtcgacgagggaagtcccgaccccagggaaccgaccgctcatgttttcccatgtgcgtgacccttcgaaaatgccccggcaattggattatcaagacccttatttcccgttgagatatctcgaggttccaagaagtcagtatccccatgcatcccatgaatcggctagaaatactgatggccttgtctcgttaagcggatcacatatacaaacgtgcccattatggcctgcagtcaggtattccagacgaagtcgactttgcgctgtaccacctagtacaaatttcaaatcagcggtgggataaattcaaatttgaaggatttcccttgcttgcggaaactttgatgcagaaagcacttgacatcacacaactctgcacgggagtgaagtgggaattccagtatgatccccggaagccgacagaccgtgccaatgtgctcaattcgttacatggtactcgggatattctggataaaattagcaaaatcccagtgaacctcccggacgacagccttgagacctacgacttcaatcatcggctgagaaacatcaaagaggccacgttagttttgcgaaacatggtgctcctgaaagagaacgcgttttatgtgtcgcgttatgcaaatggtctattgcgggatttcttggtcatcttgatcaatgctcccaatcaaccgcgactgaatgaaatcaaaaatgatgcattggatatcgcggaagaggtcaccaaattcttgcgaactgaccctgaagatccgctgtggatctctttggtgaattgccttgactctccagaccgcgcacacgttgtgcggtccttgtgggcgttgacacacttcggcactgagctagacgatgcggatgcaaacagggccatggaaaccctgaccagaccgactctccagcagatgtattatcacacgctccttgaccttgacaaggatattctgagcggtgcactggacttttggtatcaatacacgctcagtcatgacaatattgagacattgatggatgttgtcaatttcccaatcgtctttgttcctcgcatgatcgcgcttttgacctatgaagcacgacccaccaaaaaagaaactgttctccaggaagaaaaagttgcacctccacccactgacattccccgtgtatcccccgagcttttggaaaagctcatggaactgtccgaaccagagcgaagctcccaatggctccgttgctgtttcatcgaggattcagaatgcgagatcacacagatcgctttatggcaagcctaccagagccgattcgcagatccccgtgtcactggagggggtgttcttcccgcggcagagtttatcaaaaacgtcagcaacacattcacaaatgcccaggcccaggtcatcaatggccccggcactgccaccaaattcattatcaagggcatccgacctctagaaactgcgcacacattcgagggcttcccctattcctattgcagatgggctgacaattcaaagccctcaaagatgtgtcagcgtgcgttcacatctccgacagatctccggaaccatgttttcggcgaccacatgaccctggaacccacagacactcccggccagtataagcttgatcccgcagagtctcccatccatacgtgccaatgggaccactgcacacggttccgagcatctgggcccagcgccaacacatccatggtggcgggccatgtttcctcgcatttgcccgaagaccgccccgccgacgcacagcccacaaccgccaagcgtgtggttctccaagagcgaatcgtccgcaaatggtattacatggatacaccgatcaacgaaaagggcgagccatttggcgtggcctacaaggctgcgttggtgctgcgcaacatcgcccggggcctgccgaatcggaccacgtccaaatatggtggacttccctggaagaaggcctgcttcacgagccagcgccccaagatcgtcgaagtctgggaccggaatcgtgcgctgcgcaaggaacttaccgagttaatcatggtgattgagaaggaggtagactattaaatttcctattacatgttttccggtgtcgcaacggcttctttttcgtttatcatgaatcaatatctctgtacgattaataccctgattattcatgttctcactgtctttatggttcccaggtcctctcccttgtctcaatgtacaatatccaagagccaggcccacattggtggtgttttcttttttctgctttgtttttaaaaggcttgtcgctttgatctaagcctaaatccgcgcgcaaaaaggcccccgaaaagcggagctgcattactacctaggtatgggtatgggggtgggatgtctgactttttcggcgtctcttgagatagacattcgagattcgttagttagcaaactgaggatcagggtttaatccacgctttttttcgttttacatccgtttgatttgagtcttttaacctatacgcaaaacaactttcccctcatcccctcgcctcagcagcctcttcctccaaaacccgcatcgcatcctccgccctcgcaacgggtacgtagatatgatcgtggaaataaccgctgacaacattggtactgataccgtggtccttcagccggttagtaatggcagcgatcaagccgacggcttccaggctggagtggatagtaagggagatcttcttgcagggaaagattggctcgttgaagtcatgcgaggtggcgagcgcttctgttgtcacgatcgttgttccctcttcttcttgcacgattagttgcggttggagtgtcgagagaggtagtgagtggaggggtgatttggttgtgaggaagacgtagattgctgggtctaggcttggttgcattgttgccagaagaattgagatatttttttcacctggaggtgccattttggaagttgaagtggaataagtagctctgatgaatgatatatagggatatggagtggatgtcatcttggggcatggtttagctcgaagaaattaaccaatgagagcacaatataggatctacgcgaaattttgatagatgtttgtgataggaaaatatgtaaacttgcctgaatactccttaggtttctaacgttggcgatctgtctcttagctgtactataacaataataagccttagagaatactcggtccccgtactatcatttccctatttacttattacatcagtctctcttgttcaacaatgtagccaagcaatgaggtgggcgataaccgcataacgagtgattcatcgaaatattcttttgaattctggcttatatagagctaacaagctaagactagactatggaatttaacagatgtcaatctacgtaataatactagcaataataatatccgaaaaagaacttcacacttagtagtcacctgtaggcattccacccacagtcggaacatgctgtccatggaatccgaacccaacggccccgtcgacatttgctcggccaagctccgacaaattacgagcatcgaggcagagcagataactcttgctacgcatcccgtcgagaaccacactaagaagtacgccatcatcctcactagtgccttcggggttagcgacgaaaatgggctcgccaggcgattggccgtggcatgcccagagctgcacttgctgggtatcacaatcgagcttcatgataccatctgtcagagttgcctctccgcggaaggtcacagcgtagacatatcggtgtttctgagtgacaattttcggattcagagttggcagctcaggcgacaacgatttgcaaacagaccactcgactattgctttcttgggctcggtgcatggggcggaaggcaccgcaggcagtcggaaccgagtaaatgatgaacggaaagaatcgtctttcttcttttggaaggccttggctgtatccaatgaagagatcaaattctcataatagagagattgcaaacattcagaactgtcggctctcacgacatctgcaacaatatccaactccgccggatcctccttcgagggttcgagccatgcgttgaccgtgtggaagcaaaagaacgcagggctttcgtatgtcgcgatcaatcccttgccatgcttacggtcaatgacatgccacactgccggctgacttgggtctgttggcgagatcgcatctatgaacgaggagtcaaactcccgtggctttatgtgcgagttccacaaacatagcaaaatgtggtcctccgtgatgaggaatgagtgaatataaacaggtgttgcggggaaggttgctaggattgtggtctccccagtcgaagccgagaccccgaaaacacggtatgtacaggttggtcccagcgtgagattataattgaacatgtctcccgtgatagggtcggatcgggcatgagatgcagcgaggtgccccgaaagctcagggtgtaaacttgtctgcgaggccaggccgatgggctccagggtttctggatcgagcttttgaaaggcgttgtagtcggtcttcgcatagagggttcggattcctcgggaatcactccaccgagaagctgacttcgactcatcgggcttgggatcaaggcctggaacattgatcgaaagggtgacagatatgttcttactcgacggagtgggttgcgcgacatattcagtctggactttgcccaagacgctcttgcagggatcgcgtttctgtccgaaactgatcgtgcgcagagatcccgttttccttgctagttcgatctggtcatcggttgagaagcgagagttgtagaaaacccgaggtgaagtacaggagtcatctggagcaaagatctggaaacgatggttttgaccgaatccatcgaaccagtgggagagacgcagtgtttctccattctcagcttcgacatggctttttcctggacctgtgcggtacagaactccagcagcgtaggcaggaatatgtcctatcacagagagctcgacgggtttgcgctgttcgtattcaggatcgaactaaacagggatgagcatgtataattcgggggttctaactatcacttcacttacacccttgtcattgggccagttattataataatcttctgtcctatcattctccatggctattggatctgggccaatagaaggcatattctccaatgtgacgtgtcttgagattgttgcctgatattttaggccaccaattctgtttcttcccccttgtcgttttgtcgaatctgatttactgaagagattgataagtggacaatctatgcaccctttatatatttctcaaacaatagacttgtctgctgggcctaatctttgtgttcgtcatgggcggggcaatcgcgacgggctaaatctcacaaccgacttctccctttagctcgccaatcgccaacgtcgaattaccgagtctcgctcatcatcgtcgctttgagccgcgccaagtctacaaccgacttcgaatctcggattgcatattcaattctggtttcatccggggatcttggcgggatatacccactcgaaggctgttaatagcccgtcttccgcaaatgatctatcttgtgagatccacatctgaggttgtcaccttttcggagccttctattaaaccgacgccaaccccccatgaagcaacgagtacaaaagccagagaccacaacaggcccaaagatgtggaaatgtaaagaatgtccctccaattttcagcgattagaccatatgaaacgccatgcccttactcgtatgtttccaataatactcagatggatacagtaatgacttgccacagatcaaacggcgaagagccacatctgttcattttgcggctctgtattaagccgagggtgtgtcatcttccatcacttccgaagagagatatctcaccctgtcatgtgtgctgacaaaaacacctagagatgtgctacggaggcattggaaatcgtgcaaggcccgtgtggacagtggccatgcaatccccgagccggagcgcggtggaaaacacaaacgtgcctgtgatagttgtgcaagcctcaggaaagtctgtaatggggaaattccgtgtgcggaatgcacccaacgagaaagacaatgtacttatcaacgccttctcggcgacgagcttcccttgccatccatatcgcaggctttattagggaccccggacgccgaaagttcaggtgtgaataatgatgcccctaaggttgctgagtcaagttgggaccttggccctgcaacgctttacccaactcgtacggaaattaatgctcgacttcagaaattcgcttttggctgattagaaaggccaacaatctgttcttgacggctccctcgcctttcgtggcccgcattgaagattttcattctgtttcgttaaagtcattaaaagtaccatttggtgtaactattttttaatagattcatctttaattatagttaatttagaagagttagtatatgaaattgtatggtattaaataccatataggcgtatatagagtatagactcggatatactaaaggtatacacaattccatgaatagaggtaatctcttctttttaaaaagctttaatagctaataagaccctaccctcctactctattgactttatagacaatcgggagcatattggtggcatggtaggtggttgaattgacaaggtactaatttacggacgcgttttggttggggtgcgcagctcggttgcgtgcgcagctcgcttaccgaatacgttattagctttgaaggataggcatctctgtgcaatccaagttccccttcactggctccccgatgtgtagttttcaccgtggcaagaaaatggaatcgacgctatcgtagacattgtcgataaagttctcatagctcaaccaagccgtgtcatcggagctactttgcagagtcgggtcgctgaaatccatcgcatcccacacattgggccagggcaccggcgcaaaggaagtcggcacttctgcaacgtgcgagtctcgtggtccatcgacggcctctctcaaatcaagcgagaagttcgtaagatcctgttgacgttcagattgttccgagaaaagctcaggagaaatgccgtcaaaagagtattcttggcgagaggcatcaataccgagaagctgatttctttgcgttttcgcctgtgacatgagcctctctaaaggtttccagagcatgccctgttgagaatctgcaattacgagccgcgagcggtggtagacatcttcaacgactgtccagtactttgacatcaccgtgggacttttgcagacgcagagttcggcaagagccacggccaatgcgtgccacggaacccacatcgactggtaccaccgccaggacctggaacctgggtggttgtatacctcctgcgagcactgcaggttatcagctgcgattttgagaagagcattctcctggattttcgggggtatgaaattatagctgcgttgcagcggccggagacatgctagctgcagccagctacccataagacatgctgtcttctgcgcgtaccactggaagtccgacaggtcgggcctgcagcctcccagaagtactgacgtcttttgttggaaatcgtggacgacttgctgccgcaaactcatgatagttacggctggctctgtgacgtccgaaaatgcaagagttcgagtcacggacgcagccgctgcgctaaccaaggtatgcgtcatgtcggtaaatgtgccttctgtgtgttcggagattggccatgtcatgtcaaaccataggtcctcgtcgttgatgttcaaaggcgggttgtaatcgagccatgctgattgcatcatcggctcggatgccctgtctagggaggctgctacatcgagaaggccgattcccagccatgctcgtttgcgcatctcgtgctcaaaagggcgtacggtgaatggcggctggggcatgtggagagataatgcctgccctactcggagtgccatgctcaacatagtccagacccttcgactttggtcttgagatcgtgcggcgagctagaagggtttagattagaatttcaagatgaaggagcacgaagacgataaaattgtagttgtactgaccagagagataatataagcttgcagaacagtgagatcgttcgtcgtgacaaagtccgcctttgcgagtgcagattcggtttctttttggaattctgcgactattatcttcttgctcgtgttgaacattgactgagattccacttcgtcaagagtacaaacagcgcaaagataaatagccgaagcaagggtggctggggcctggtgatcctgctcatagtcaagataaggcttgccatccctaataaatgcttggagcgacggccgatgtaggattttgaacagaggatcgacgttgcggaagaaaatatcacataacctgtgccggatttggggttgaagatttaatcgactgttggcgtggggtgagttcgacgaactgtcggggctttctgagctcagaaccgacacaccaaaaccagacgctgaatctttgatatcgtggttttcattttctagacgatcttccaggacactgcgcaattcctgggtctgtgattgtgacatgagtcaatcacatccccaaatcataagtttaacaaacttacttgctgcatgatatcctcccaaaatggaccccccacatacgcagttgaagggcggggaagatgtggctgggctgcaccgggcaagtagtcgtgatcctggtgagtatcaggaccggccgtgctggcctccgccaccgattcctgctgtgtagatgaacgcgaaggcacatggacaatggaggaaatatgcgattcatcacctcgttcatttgcaactatctttagaagtttctcgagtctcgctacccgctcggatagttccttgtccgagcctacaatccgctcaggctttcgcgcgcggccgcggggtagacgcgcacgttccacaggaatacacacgaggccaagtcgctggcagcttgtacaaggactcaacttgtcgcatttcactttgcgctggcgacatgcttcgcaggtgaggcggacccgtggtgcggaggaccgtgagtgggttgtcccgacttggcccacgggatcggccattattcaccggaacacaatttgtgtggctggaaatgaggtaaatggacttgagatggattgttcaattttttcaatgtacatccatgcttgtcgaagatccaaggcacttgcatgcgaggttctgcgccacccccgcgaagctatcgatccatattagcttttactggccaaccagggcttgaattggcactttctgtatttgcggatgatctgcgcacctcaaatgcaaaatgcaaaaaaaaagaaaaaagaaaaaagtgatgaatcggcagagttaatcagtaaaacgtcaaaaaggcggtaggctaagcggtgcaatctacaatacgggcaatattatatctgcatgcttgaggctaaccatactaaccaatcatgagtcatgatgataacctacaaggatggaaatgggtgactatgtgcctaagtacctttctatacatatctaaatcaataagaataatagtctttcttggtactgtttcagatgtctttttagctgttttttattaattatacgaagaagttaaggtgacgatagatagggtagaatttagaactagatagaggcaccgcataaacctatgatatatctctaatctctaaacttttatagaaaggtacttggatggtatcatggtcgatatggtgagaatactatagggaaatggtagctagtaggatcagtttgctatcaggtacctctctctcgttcctgctctctctcgttcctgctctctctcttcctccatctctcttcataccatctgctcttcttatcctcacagcacttctgcaatgttcgatccggcatatcctccttctttttactttatgctgaagcttcttatcgttctcttgacttatcagtgatggctgatccagctcctgtcctctggccttcgcaccatcccagggccataactcttttgtcgcctcgcaaaaggcgtcgttatcttcgtggatcagaagagtcggagggtgatatgagtctggagcagtacatgcactcctccgagatctagcggtcagtgtcactagtccactacctctaccggtgaaaatggagactatgcctgccctagaacagaggatcagtccactttacccggagattgaagccatcatgagccggcacaatcttaatgtcacctcaaccttccaatgtgggaagatgagcaaaccaaactatcctggaggtgatatccctttgaacttcttctgtatctctacagagactactcagaaaagagagtcgttacccaaggacacggagaagtcctagtgaaggtggtacttgtggggccatggacacgcgcaaattggttcgagctgcgaactcaaatcatatcagttttcgcgatataagctttatttaaaataacactctgatgtcttatttagacgtcttttttactagggtttcaaaaaggtagaaggataatattaccaatgagaataacagtagggagcagccataccgagcttacttcctctataccgtatgataacgtctttccaatgtataatggacatcactagatcacaatcaaaatgatcgcaaagtactccgtattatccttcaatagtcgatgcttttcttcaccgtcgattaattcaaatactccggcaccgtgcgcgccgcccattcccggttgggaatatacgaattagatcggcatccttcagagttttcgatttcaccgagagctagagcctttgcaaaaatatggagtattgtgtcgtgaagttgtaattagggcagtaaatattcaaatgtttgaataatcaagatatatccccgaactccccgagattggagtttcaggttccaggtttgttcagatgcaaaaatgggctgcagaagtgagtgcagatcgcaagaacaataggattgtactgccccacccctaacccctcctgctcctattgaaacgaagaaaccattctgtagggtcttgatgggggggttatttgacgctattgattttatatcataggacacccacgacgatgtagcccggtttatgggggtaagacgatcttggccgtgagtggaccaatcgctactcagagtttttttcaaaaaaagcaattattcccacgctttgggggttccacgcacccacctgcagtgatgcaatcccaagcaggggagagattcctattatgtacatataggccgacaaagcaagcatggatcaagcatttgaatcgacgaatcagagaacgttttgctgaaaacaaagttcatgccatgcggagaccatgtggtcttcagggcatccttcaacctcctacctaccctcgtaggtaacctgtactccgtacgtagaagtatacgccgtatactcttgacaataatctgcaatttacggtgtacggtgtgcagcggacatgacaaatatcccttatagtcacaatgcacgacacaaattcccgctttctactgatcgccacgtgagaatgggcccgctaatccctagtcccttcggacaaccaggctaatgggacgaatatgaatgcatatcttatcaaattaaatacttgtctactattgctccatatctacctcggtggctgaatgtgatcttcaaatccggtggagagggacctcttacatacctcgggctttattttccttttattgcgtacgccatactttacggtctcctatccctcctttgtacatatgtattgagaagcgggccattccctaatcccgggatacttgatctcgagcattgagaaagtgccgttcatatctactataagtcaaccggggaactttgcgatctctctttcagcgcattcaacacccttctgttcatcacaatccgtgcactaaactgggccttcactcatttatatacgcctttatgacacgatgactactctatcgacaccccgtggtcaccaggccctcgccatcagcattgtgtttacgactatagcgacattaattgctgccgtgcgtatacttacacgagcatttctcgtaaagcagatgggagcggacgactatgtcatcctagtctctctggccttctcgtgggttttcttcggcctgatggtcggcgaagtctaccacggcatgggtgagcactatagggatatccccgctgcaaccttcaagactcagatgctggtaagttccgcagcagaacatccctccaacaaagtgcggttccattgacatggccctcttacagtacttctgggcttcagttcccatatatcaaacaagcctcatcagcacaaagatgtcgatccttctccaatataaacgagtcttctccacaccacacatgcgccgagcgtgctggctcctgatcggctttctaggcttctacggagcctggaccatcatcagcgcctgggccaactgtgttcctctcgcgaagttctgggatccaactgtcccaggcttctgtttggataaaaaagccttgtggttctccaactcggccatccacattcttaccgatactctcattctcatatacccaatgccagtcttgaaatcgctacaattgcccaagaagcagaagttcgctcttattgctgtcttcgcgctaggtggattgtaagtccgcctcaatatgatgagaatcatttaacaatactaacaatcattcttccagcgttttgatcacaagtatactccgcctcaaatctctcctcgttatcgccaactcaagcgatccaacctgtaagtactaacaatcacctgcaaaacccttcccttatccacgagccaaatctaacaatctaccccagacgacaatgtcggcgcagcaacctggtccgcggtcgagtgcaacgtcgcaattatctgcgcctctctcccgggcacgcgcgccttcctctccaagctcctgcctcacatcttctccacccgaagcaacggctaccgcagcaggaccacgcgacatacgcgaaacggaaatcccctcacagcaaacggcaacacgcaagtcctggcctctgtcgtcggtgggcgtggtcacagctcggattatgaccacgatctggaagctctgtcgccgtctggttccttcaatagctacaccaaagagcctgtgaaggaggtttttgcgggaatcaaggtcacgactaatgttacgcaggagagtacctcgcattcgaagattgttattaatgatgatatgggcagtacgaaggaattggtgaagaagcatagcttttgatttataacgatttgggttgggttcattctctatactttctttttttttctttttcttttcctttcttgtctggtggtcttctctcttgttttatatacctatggctcttacgtggcggttctttggcttttacgcgatgatatacccaattacaacactattaccatcgaatatccaagatatcaccacattctcgatgtatgagggactggctagtgattcattgaagccgcggatcaaaaaagatctaactaatcaatttacctcgaagcaaaattttatcgatgttatcagacaggacatggctagaattaaaacaatcattttattaaactatggtcgttccagacctcaagggtacctacacagtcttcaaacatgagctctagggtattatggatgcattgtaagacaagtgtacagatttcgaggcgaacaaaacgagctgatcattcagtatgcatggaacccgcccactgtacattcgaaagccgccaacattttagagaccaagagctcgtaacaaggaagatataaaagggaagaagagaaaaaagaggaaataattctaggaaaggatattgaaaacgattagcaccggtatgtgcaatcatgcttgcaaatacgcagctgtcctcgtgcaaatcctagaaattcaatatagtggtagaccttagatcggttgcaaagaagatatactctactcccaaacgttggaaaagaggtcgtcagatcctccaaatccactagacttgttatttgtgcttgtagaggtagggtgggagaccggggcagcgctggcccagccgccgaagtcctcgtccgcagccacagtgggtgcaggcttagaggcagcagcactgggtgcgccccagccgtggcccacgtcgttcggagtcaaggtatctggtaccttcatcatagatgcaggcgagggtacggcatgaggcgatgaggcatgatcaggtgtgctccacgcgttcccgccccatggatcaaagcttccagacatcatgctggctgctgctgcgttcgcagcgctggtggctggcgctttcaagggggcaggaggctgcattgggggagcagaaatattaaacgcagatctcatttcctgccgaggagaggttgcagtaggcttcgggggtgggaccgttgaggcttttgtagtaggcgaagaaaatccgaacaagtcatttgacagggacgatgatggagggttaggcttaacagttggagaagtaaatccaccgaatccgaaatcttgcccactggagatggaagttgttcgggactgagacttcggggctgacacggttgcggaagtgaagctatcgaagaagtcgcccgtagaacccgagggtgatgtaaccttcggggcagcaggggtcgacttggcgccgccgaaggatgagagattagagaatgccgatggcttctcagccggtttggcgagtggaggagaagtagtggtcgggaagctcagtccactgaaggcgtccgtaagaccgcccatgtgagacgaagcggagggggcaggaggggaggccatgtcgccgaaggagttgccccgctggtgctgcacggttgatgccggctgcggcttcgagtacaatgacaagattgactgtttgaggtctggccgagacattccggctggtgttgctggtgtggatgttgtgctagacgggcgactaccagtggaaggctgggtgctaccgaagaagtcaagacctagcaatgaatcattgggtttgtgaattttggctggtgcgggctgtgcttgtctaggtggcagacgcggagcaggttcggttgtgctagggcgattcggaggagagatatcatcgccgaataaatcaatcgaggcttgttgacggtgtaccgggggctgactggcagcggcggctctttgcgaagcggaacgttcaatttttgctttctcctgtacaaccgcaagaggctagcaagtcagtggttactgctgacaagatggtttatcatgcaatcactcaccacatcgtcatcgccgtcatctagagttgaggggtccggaatcccaccgtccattacccatcgcttgctttcgtactttgtccggatgaagttttcgattttcctattcacaataattgtcagaaaacaccaccacacaacgagtaccattagaatgcccttacgcatcggagggaacgtggccgggtgccagctttgcttcccagtatctgcatcctattagcccatgcccaacgtggtcggtcaattggttgcgacgaacttgttggctcttccattgccccatctcacaacactctgaagttgttcatcggtccacgaatcgagatccacggatttgactcggctgatatgcgtgcccataccccggtgaatgcccgagcaccgaatgcaaacaaagacacccaggttccaggaagcccatcgcggatctattcggaagacaattcagtatatgagcgccaagaaatatcctcggatatgaagccagcgtagggcgcaatttcaggaggggatcggaaaccactcacgcttgttccgtttacagtcggcacatatcttgttgtgctcgagtttcagcaaagtcttgattgcctgcgtgttttgggcggcttggcctggggtaggacgtcgagacgacataatagtaacaactcaagaatcgatggtgaaaaagggatagggaaacaatgagagccacctaattattcttaggtggcggtcggcacggttgcggcctaaggctatcggggtgtatacggatgagggaaaatgccagtcacgcagtttggtataaggtaacatgaggtcattggccgataagagtagatatttggaaagataaagtacattgtatattgtattatatttgattttcactgaattaagctctacaaagatggttggtccactcaaatgacgcctctcccccgtatcatgcatgccggctattctgcagccttagtccccgcaaaccgaatgatgattaaaagtcatgaaaatcccttagaccttcgcctgagggtccttagctgcaccggcatcttctgtaaatcgcagactaacactattcacacaatgacgctcgtccgtgggagtcggatacccctcaccctcgaatacatggccaaggtgacccccacagttgctacacacgatctctgtccgcttcatgccgaatgtgctatcaacatgcctagtcacagcaccagggatggaatcaaagtatgctggccaaccacagccagatttgaacttgtggtcggcagtgtaaagcggcgcattgcaaccagcgcaattgtagacgcctttggacggatagtgggaatcgtattcaccagtaccagcacgctcggtacccttttcacggagaatacgaaattgttctgtagccattctcgtaagcaaatatcaaccgtatattgcgtaggagttgaaactccatggtgtgcaaacctgggttcaaaacagctctccactcggcttcgctcctctggtcgggtggcgacatggcttcggttgctttctcggggctggggttggagctgaagaaggcaccgaagaatggaatggtcggtgcagccctaagaatcctggtgctcgtcttcgaatgaggaggcttgcgcgttgaggacaaaaatcgggagaagcaaaatggtggtgcaggtcgggtggggatagtctgtcgtttgaggggcgaaataagactacgagataggtgagatcgcatagagacgagttgatggggaaatgagaagaatttctagtgaccggcaattgatgcagagatgagagtggggtgaagctaatcctatatggcctaactagttgggtgaactgggtgcatttacgtcatcatgcggggagacggttcggggactccttgaggcctagactgatatcgctgtacaagatttatagggcgaatagatttttatatagctcgtaggctacgctgttctaaacccgatgatttctttctgaaaaaaaaaaaaatgtttgattaaacagccccaggtcccacctgggaaaactccggcagtgcaggggtatcttaacaacaaaatctgacatatgaacaatattgaagaaaatggagaagaaaacaagtcaaagaaaagtcaacggcgattcacgccggtcaccaacatggaaccccggttgagctccacacgccacccctccttcagcagcatgttccacacggcgggtccaatatgtgacttgcggtcgagggagtggtgaccaacaccgcacacaatgttgaacccgccgtgggagctctggcctccgccacgaacgtacttctgatctcctagtccgtcccaccacgcctggactctctcgcgagcaatcctgaccgcgttgacgaccgtcacaccatgcagatcaaggtcatattgcgacgactggcgggccaccagccggtcagaagctgttgccaaatgacgcatggcaagctgacgttgctcgtttccaacgtcccggtaataggcggaagcgccgccgtacagcgggtttgagcgtgcgcggcgggcggcttgggatgcttgggcgagggcaactgatcgggctgcgaagtgagagttggcagcggcggcagcttcatcaaactccatgaaatccgaagcagaatctgcctgctgggctggcgccacgttttcctcctcgtcgagtgcgattggcgacgaaacgaaactgatgatatttgaaatgcaagtgagatcagggcgacgggccaacttttcagccagttcatctgcggctgagatctgattgcttgatatccgaaccaagcctgttagagtggtggcattgatgccggggtacttgtgactgagctcccccacttgtgtaatgagtacaggatcgtcttcaatctcctggatgtccttgggcccatggatctgtgccaagactctgatcgtcgcaccgagtgacatggagttttcatgataagtcgatgcgattttctccctttgcaaagcgctggcccgcgaggaaagaaactcgatatccttctttcctgcctcccatttattggcagaggtgttgttcatggcctgggatgccagttcgattcgacgttgttgttgctgcttcttcttctttcgagatttcttactgccgttctggttctcgttggcctggaagccatcgattgacttgggagtggagaattgaccgccttgagcagcctctttgggggtttcttgaggaacttctctggcaatttgtgtctcttcgatgaaagcaagattgagcaaaacatccatcgaacgactgaggttgtcatgacaatcttctaggatgcgctcggcttccagacgagtaatacttgggaacatgctaatcaagttttgtgccttgtcagcagttgacatgcccagaaaggtgtatgcaagcttagagcctttgagcttttcggcatggcgactagcactattggagtcaccattgtcctggtcaagactttcgagcgatggccagcttgtgaaatccgatggtgcgtcgtcagacgattcgccgcccaaagagcctgaaacgtcagagttccggaggttcgttgtgcctgtggggtcaaatggcaagtctgcttgctcaacagcagatgcgttcagcaagtttagggtttcgcgcaactgttcgacctgagtggggatcgccaggtcaaagtccgatacgatcgcaacaaacaatgcaggatcaattggtggacagtaggtgctttcaagctcctaataaagaaatgggcattagagcagagcgtgacaagtgactagtacatcacgctatgcctacactgtgcgtgaatcggtgggacgcgacgtaccttgaagagctcatcgccacagtcccccatggctgtgatcatggacttagttgcagtggtattggatgtaatattgtcattccctatgaaggactgcgaggttggataattgtaaaaggcgttaggggagtgatgaaggtgaaaagtggcttttttccgtgatcttaatagctttgcgataagatacctagagatagagatcgatgcggcccggaagtaatgaagatgggggaacgaatcacagagccatacgacaagtcacgttctagtatcacgtgggtggggtaagaaatggcacgtgtatatagatcacgtgctcgggcgagagttttgaatggcgtggctaagcctcaaaacagaactgagcggagggttgcttttcatacaatctagaaactgctacctaacaacatgtacttgttccatcctatccgccgaaatctatacttgtgcatatattgtaatatctacctctgtaagctctacgaatgtttcttaaccatgtaaagtacacactccattgtcatggagtctgctgttcatccatccctataattaccaaaatgctggcgatatgtattctttttcgtctagaatgatttgatatcactcaccggtcgatccctggatatgtatgaagagagtcgttctattctgtatgtaggaattggggttttcaaccttcaatatgacgttccttcccaatatcctaagctttaaggaatatgaatccaagtcagagtaatattgatagtatatctacgtaggcacaaggacgaactaagattatgtttggaacaggctgtgattcattcatgtggggatgttaagcgttggaaaagaaaaaaaaaattaatgaaatacagacaaggtataatcgtgtagtgtaccaaagagggagagaaaaaggaaaaccccagacgctatgcgaagagataaatcagggcttgtgcccgaacaccaggcccacacattgggccagatatacatactgcactccttagtgccagatgaccaccgagccaaaaaaaaagacgcaggaatcaaacaaagaggaaaccctccgccaaagccgcatttcaccttccctgttgctagatgccgatgagtgcataacgatacgagcccccttgagaattggtacacggggaattatgaagaacatttggaaggatatgggtaatgcatgaaaatgggagaacgcggcttgagtgtacatctcctaggaacatcctgaaccgacaaaaagcatgggtatttccgtgagctgctagaaacgagaaagcagaagtgaaatagaaagaaaacgagtgaggatgccagccccagatcaccacatatcatcgtcatcgtcgtcatcgagttggacgtcgtcgccaaaggacgtgtttccgtattggtgacctgggccataagcttggccattttcatagccctgcttgtcgctcctcgaatggctaccgtagcgatcatgcgaatcgtcatcatagtcgtacatggaagagtcgtcataggcactttctccgtagtgttgttggtcctgagactgtgcgaggctgttagcaatcttgctttcccctaggacaaggggcatcttcgcctacctcttggtatcgctgatattgcgcatactcatctggctgatcccttgattttgatgatctctgggatgatccagatgaaacaactggcatctgcgggtgcatctgctgtaccttggccaggtatgagtacatgaagttgctcagcaacacttgagagtacagagctcgccggggattcgcaagcttgatatgcgccatccggtaaatagctcgctcctccaaaattgagaagcgagaccacggataatcgacgtcggcgcgaagtactcgcatcggaggatcaggagaaatgtttcgtgacgaatgttttcggtggtggccttcattactgtgtttctttcgcccaccgccgaaaatcgaagagaaaataccatccttttctttctttgattctcccgataccctcctcacgttgtctttgcgtcgatcttcatcaaccttcggatcaaggcggtccaagacaacactttcccgtccccgcggagtgctctcgatagatgattgtaaaacatctagacgtgtgttatcatgcgttttgtcgacagtctttgatttagtctttttcgagtcggcgtccttgtcttttttcttgtctttttcttcgctgcccaacaaccagtgccagctagacttgcggctaccatcagattccttcttgtcttttgatttcttgctctcggatttgcgttcttcaggtttgcgttcttcaggcttgcgttcatcgggtttgcgttcttctgagatggtgggtatgaatgaaagactgtcagtgcgggtactgttgccaggtatcatctgagggttattggcgatgtcattgagtgaagatgcgggttcgtggggtggtaggcgagggttcttgggacgtttcggtatcgggtcctgcgaagatgtggatttcgatggcgatggagttgtagatgccgtggcatgatccgatgactgcctactttgtgaaggcggacttggtatgcggtcgggttcagtggcgggaggtgtttcaattattgcagggatcttctgctcgcctggagctatgttcaaggtagatcggccattcgagctgatacgagaatgccatttccgtgtattggtcggatctcccgaatcggatcgatccagatcagcatccggatgcccaccagaggtcgacaaggcttcctgctcggcctcaggctgatcgacaatcgaatcgaattgagaactcgtggttgagcttggtgcataagctgagccatgcgatgaggcagaggtagctcgagccgctcgcgtcgttttgggattagaaccagtggagacaccggtgagctccagacttgcgggatcttgaggtgagcgaacacctggagatctggtatcactccccgcagattcagataccccccgtccgactcgtttagaatagggcaacttttcgccctttttcaaactgcctttcttatattgtgtccgagtcgaccggcgtaggctgtttcccggaggtgcgggaggcaggatcggcctgtcctcgtttcctgcaatggcaatattccgcatgccgcgcaagagtgattctttggccaccacttgcgaatcatccaccaagctttccaactgctgcaagttgggactcaacatcccaccttgcttatttgattgggagcgttgatgttccaaccgatctgcaccatctgtataacccgccgaattgtcgatttgtctcgataacatagagcgtttgcgattaagaccacctcccgacccttgacgttcggcccctaaggtcgaagaatcgccggatctgcgctttatgaggtcggccttgctgtcgagaaacgacttgaattctttcggcgccagttctggatgcagtcgcgcaggaacccagaataaccgagaggcgtcatcttcgtcggcggagggcgagggcggtggtgcgaagcctgggaggtcagggtcaccggcggcagccacatccattgacatgcgccgaatcgcggcgagattgttgagttcctgagcgacggccgcagggttggattcgtagtcgatatcgttgagaggaaaagaggacgttgcagtgtccgagggcaaacgagtaccatcggcattccccggatcactttctcggtcataagatcgatttgtgacaagcggtggccgttggtttccatttgtctgtgtcggttgcccatctgacgtggattgatgcagtggcgaggacggggaaagaggagactcagaccctgcggcggcgcgcgggatggttgttattgactcgccgaggggggttgttatataactcaggcgcctcggatcattacgatcgtagtcgtcgtcgtacatatgtccgatagcttccgtcacatgatggcttggatcgctaatcgatagatgggtggcatggcctctccgcgtcgcatgcccgccagcctcgtggggacttgtggaagcctaaacaggtgcaaatatcattagaatcaagaatgcgccagtttagagtcaagatccaattctcagagtccatgggaaggggtccaattccacaagaatgtgattgtagttgtgcttgaggggttcgaggttgaggggggtatcaacaaaaaagtcacgcccacatgaactaaataccaaggaccgagaaagcgacgcacctgcatggaaagccagtggtacaggaaccaaaagacgccaaagacggagcccgaagggcggaagcttaagaggagggggcagtgtcaaccacgttggatagcgaggaggaacgggtcatcgaagcggggaaagaggaatggagacaaagaaccggtagcagcgtcctcgacatgcggatattatcgagtccgaatgagcgtcatgagtggagaagatctgggagaagaaaggaaagaagagaagaatggaggatgggagttgagcgggcggagagcagatgagagagtaacctccgcggcacctgactatcttgaactctttccaaatgcaaattctattatatcaaaagttacagctattttcctactcttctgaatttagatcgtttaggggtcttttacggagtaggtatcaattcattgagcactgttggctccacctacattaaaacgggggtagatggacgatcggttgatctacatcgtacacgttcccttttcttgctttcttccctttctctctcgactccatactatttgattcagtgatacattctttggttcagattctaacatcggatcccaaagaaagtaggtactacctttcagagctgatttgcaatatacttcttcgatccgtgacacagcatgtacctcgagggctgaaaatctcacctctctcgtgccgattatattcatctttgactgagattgaaaagcctagattgacacgggaaaggttgaaagcatttgagaaaagcacatcggccactgcaaagccgtttggtatctctttatctgtaatataaactagacggggtcatctctgagattcgataggatgccgtgtgacttgattcaattccccgtagaccgaggacagtagctggatatgccatgcaaatgttcgcacaagccaggccagaacacaaagcaatcccgaccagtaagaaacttgagtacatatgattatggtattggaatcaacctatcaaacgcaaaatgtcaggtccattcaaacagagctgaacggtattttcaacataagagactaggaagagaccaatgagacatagatggaataaactctgaagaaactctgcagaaactcttggggaaatcacaatcagatgggaaatgctctgcataaaaccgaaaagatccacgatgaccgtatccccaagtcccaaaccgaaagagaaaaaaaaaggtatgagaacgggaaactccgcgctgaagaatgtaaacggcaccaacaactttaacttagaatgagagaaagaaaggagaagacaagaggttgacgaatccgtatacgccaggatatatgtagggcaagagttggtgggacgtatgttcatcaagtcccgggaaaatgtgcatcaagagttcatcacagtgtgtgctacatggaccgcatcaatttaagcctcaacataattgctgcgaatgaattagccattaattctagaaagtgaaaggaaaaagttcttaccttgggaagatgcccacgcgatcaccaatgcgaccagtccaccagtcttccgccttctccgtccgcttgattatggtaataatttcacccttcttgaatccaaggtcaccctcctgatccgcatcgaatgtgaaaagggcaacggcttggtctgaccgcaattgggctgcaccagtcctttgctggaagatcggtttaggagcagttggacgggaaggtctgcgatccgaataggtatattcctcttcagatggcgcggtgttgctccggttgcgcccatagccatcaaatgaattgtcagcagcggcccgagctgtcacggaacgagaaagccccgaggcaggccgatcatagacatcatcagcccaggtattcgcgcgacgcggcctatcactgtagctgtaatcattttcactggtgttggaccgaccacgctgggtaccttgaccgtaggcatcgcccctgcgtccctcccagaccacgtcgtcatggctgtcgtcatagacaggaatgtcattgtacatggaatcaccgtaggcccgcgcatttccttggaatgcacgggagttcagcacgcgcatcagagcatcggcggccggtgggggacgaatgctgcctgtgagaagttggctagcggagacacgactgcggtataatttctcgttcgcatccttgcgttccaccagcatactaccttccagactgacaccagcgaaaagacctttggtttttgagtaggagaagacggccgcaacacccttcgtactggctgcgccagccgcctcggcatttcggccaatcggtccagcagcgagtgatacattgccacccagcgtcagcgttcccacttgcgagaatgtgcgaacagcagcggcatcgttgagaatgaaaacaaagtcggtcaactcaaacccgatctgtcctccaattccggcacctgcagtcgcaatagccgatggagccgaccaggagccatcgccaagacgagcgacaacgataccggagccgaatcgaccagagcctaggaaaccggccttcaaaaccgtgagaatagcgagaccctacggggaaagatttgttagtcacggatgttcccaaccggggcattatgaatgtcttacctttgcattggccaaaatctccggtggaatgactttgtcgggaccgaatgcttgcctaggatcaacgaacgatgtcaagatctttgcagcctttttgcactcgcctggtgagagagaatccactgtcagccggatatgccgcgcacgactgcggggaagtgggctttgagtatcgatgaaacctactggtcatagacgccggcagcggattatggatgccgaaacccattttggctggtgactatcgaggtagaatcgaaaatacgacttgggagggaggaatgggggggaatgctattgatgtctcgagggcaacggttagtcagtgtgggcctgcccagctgatgacggctaacgcaggacgctggttcgtgggaagccaacgtaccagaacgccgagactggatcagatacatatgttgtatgcactaggtattatacaatgttggagatgctttgtgaattggagagcaaacaccacatgatatcccacgggcaattatgggctgaaacgagcatcgtttgtggcaaattggggttttattcacaatgtatcaggaagaaaagaagaacgacccagagatattttagccaaagcgacagtttcccgatgggtagagaaacatgtaactatagccgctgtataactcttgtataaatcgtaagcatacttgcggatgcccaggcgccaaggccattatcgtatcgcgattgtcccgaggccgaccttggaacttatccatctccatacacttcttcaattaagcataaggtcatggttggattatgataaatacgtgactcgctagacgcgaaaatggcatcaggtatgttggatatcccacacctagaaacactgctgacaggccaactcacccagttcgcatttgcgtttgcggcgatgagggcactggcaagtccagccttatcacttcgctcgtcaaaggcgtgtttgttacaaacaaaattcaaccggtcctcccccaaatcaccatccctcctaccctcgggacccccgaaaatgttacgaccacgaccgtcgtcgacacctcggcccttccccaggaacggaacaatctcgcgcgagaaatacggaaatgtaacgtgattcttctggtatattccgaccactatagctatgagcgagtcgctctgttctggttgccctatttccgctcgttgggcgtcaatgtcccggttgtcctgtgtgccaacaaggccgacctggcgactggtcatagtgaaacgcgagtggttgaggaggagatgcttcctttgatggcagagtttaaggaaatcgactcatgtatacgtacgagtgcccgggagcatcgtaatgtcaacgaagcgttcttcgtttgccaaaaggctgtcacgcacccgatcgcgccgctgttcgattcgaaggaggcggctctgaagcccgctgcagtagcagctctacaaaggatattctatctctccgacaaagatcgcgatggatatctatcagacaaggagctccaggattttcaaacccgctgctttaacaaaccattgaacgaagcggatctcaatcatatcaaggacaccattcagaaagcctatcctgactcagttacggagtccggcattgactgccaagggtttattcatctgaacaaattgtactcggagaaagggcgacatgaaacagtttggatcatcttgcgagcgttccagtacacggacaatctctccttgcaggagaaattcttgcatccaaagttcgaagtaccgccgttcgcctctgccgaactctcgcccgaaggatatcgattctttgtgaacctctttcttttatccgataaggacaatgacgggggcttgaatgaggctgaacttgcatccttgtttgcccccaccccgggcttgcccgcatcatgggccgacggttcgttcccatcctctacagtccgcaatgaagcaggacatgtaacactgcaaggctggcttgctcagtggagcatgactactttcctgtctcctaaaactaccctcgaatacttggcatacctgggctttgagccctccgaccaaagtgatcagtctattactgcagcgttgaaggtcacacggccacgaagaaaacgtcgccgccccggccgtgttggacgaaacgttgtccaatgccacgttctgggagcccctggatccggaaaatcggccttgctcgatgcacttctttcccgtggattcagcacgacctaccaccctaccatccagccacgtaccgcagtgaatacagtggagcttccgggcgggaaacagtgctacctgattttggatgaactaggtgagctcgagcctgctttgctggagaaccagaccaaactgctggaccagtgtgacgtgattgcgtacacgtatgattcctcggacccggactcattttcgtacattcctgcattgttggcgaaatatccccatctggaagagctcccgagtgtgttcattgcgctcaaggccgatctggatcggaccacccagcgagccgagcaccaacctcatgaatacacagctatgctaaacatgcctagtccaccgctccatgtgagtgttacgtggaattctatccaggaggtgtttgtccatattgccgaggctgccatggagcctagcaccgctttcccgcgtagtgaagaggatgtggagggcaaatggatgtcttggggaatcgccctcggggcggtggtttgtgccggtgccgccgcggtgatgatctggcgccgagttggtagcggaaattagggtcttcgttcatattctataccccatagttcaatgtgcaaataaatgtataaggatctcaagagttagttagttaactagttatgtacctcaattgactataatacttagtcaggcacatggccggctcagccggagttaagccggtccccgccaggcacgcggtctcttctccgctcgaacgtttaccccagacatcatttcccttgctgatcctcccctctcgcgcctcaacttgtatttttgaaatctccaaacctccgaacatcgagcctaatctcagtatacacatctgatcgagtgcatatatacatttgtgattgtcggacctattgcgcacccatatcgcgcccccccccccccccccccccccnnnnnnnnnnnnnnnnnnnnnnnnnnnnnnnnnnnnnnnnnnnnnnnnnnnnnnnnnnnnnnnnnnnnnnnnnnnnnnnnnnnnnnnnnnnnnnnnnnnnnnnnnnnnnnnnnnnnnnnnnnnnnnnnnnnnnnnnnnnnnnnnnnnnnnnnnnnnnnnnnnnnnnnnnnnnnnnnnnnnnnnnnnnnnnnnnnnnnnnnnnnnnnnnnnnnnnnnnnnnnnnnnnnnnnnnnnnnnnnnnnnnnnnnnnnnnnnnnnnnnnnnnnnnnnnnnnnnnnnnnnnnnnnnnnnnnnnnnnnnnnnnnnnnnnnnnnnnnnnnnnnnnnnnnnnnnnnnnnnnnnnnnnnnnnnnnnnnnnnnnnnnnnnnnnnnggcgccccccccccccctgccatattctgaaacctgtccatcgcttcccaacacataagagcttgcagatataagatcaaaagaggaaagtctgaataaagtacatcgcagacctggcatcttttttgcacttgccttatcgggtccaaggttgctctgtttgtcacaccagatctcagcccgagttcaaattgcgcctgtaccctgtacgagtgacgactaatcatgttgtaagcacgcttgttctttcctttcctacttctcccaatctgctactttcactctacaagctcagccctgtgcccttactattatcaacgtaattcgagagaattgcatatctcttgaggcaccagataaccacaacacttgctgacaccagcaacagcgtgcttccccctcctcctccacgctataccatccctgtcgcctatgcggcgggggcggcaaatggtatggcggtccctgttctggaaatgaataatactattacccacccggagcgtggctgtccactgcaagttggcgagggtatgtgcgctccacgatcgctggtgtttcctaaatgtcctgcttccttcagaatatcagagatgtcttacattttatattgcgacaggaacctacaccctccaggatgatttactcctcgcaacaccgcctccccacccgtctgaagctcctatcatcaacccaaaccctcttgcaactctacccacaccccctaccactggcgtaaagctatctcttgttaccctcgaccctcgaaagaagcctccgactttcttgaagtcaggtatcacagttccccaatttggagatgaaaacccggcgcttgcggcgccaccggtggcagcgaaagacgcagcgaagcgaaggaagcccaagaacaacatcatcaagagcagttcttccttcgtctcgcgagtcattacacacgagacatctgccaagcgattgagcgaccgtgacccgaacggtgtgtttgcctttgcgaatatcaaccgagcattccaatggctcgacctcagttcgcctacgaaagaggagcatctcaccaaagttctcttcacgaaggcgcatatgctctgtcacgacatcaacgaactcacgaagacgtcatcacatttggacattgtgatgggatcctcggcgggcgacatcatttggtatgagcccatgtcgcagaagtacgctcggatcaacaagaatggtgtggtcaataactcacccgtcacccacataaaatggcttcctgggtctgagaacctgttcttagcgtcgcacgctaacggtgtgctggttgtgtacgacaaagagaaggaggatgcccttttcactcccgaggtgaacgaccattccgaacaagaaattggacgattgccattggacatccttaaatctgtgaactccaagaaccagaagaccaatccggtctccttttggaaaatggcaaaccagaaagtttcaagcttctccttttcccctgatcaaaggcatctggccgtggttctcgaagatgggtcgctacgactgatggatttcttgaaagaggagtatgtttgtcctatgttaagaggaccgaacgattactaaataacgcttctagggtactggatatattccgcagctactatggcggcctgatctgtgtctgctggtcgccggatggcaaatacatcgtaaccggaggccaggatgatttactgacgatttggtccttccccgagcgcaaggttgttgctagatgccaaggacacaactcctgggtttcgtgggttgcattcgacccttggcgttgtgaccagaagacataccggttcggcagcgtcggtgacgactgccgcctcctcttgtgggacttcagcgttggaatgctccaccgtccccgggcacaccatgcctcaagtagaaatcgatccagcattgtagtgccaaattctcaaattgctaatcgccaccgtgcagacagcggcgacaaccgtgtgcgttcggactcaaatgaaaccgacaagttcaacgaagatctcgatcagacgacgagtcatcccgtggaacccaagtctcgcacagcgcttttgcccccgattatggtaagcatttattgacagccaaattgcctgcttcagaagactaactgatccgtagtccaaaatcgtcggcgaagatcctatctgctggcttggcttccagaaagactgcatcatgacttcgtctcttgaaggtgtgtataatgaggttggttggggctaattaatactgacattttgacacaggccatattcgcacttgggatcgacccagcgacagcgtcatcaaatcatgatgctccatttgggatttacagtcttggaagccttgggggttaccaatcgagatttcagtcttttagcgtcgcgttttctactcctaacacatgatatttttttatgtcgatattaccttaccaatctaaatctgtacatactgattgtgtgtaagggctgttctatatgtcatcctagaaaccaagcgacggcacacttaactcgaggttctcgggtttcacctcggttttcactactaacaccgtgagctacccatctatttttctttcctatctggcaacagaattaatgagaatagagtaatggttaactcaaagatttgactgatagtataactccaaaattatgaaacaggcatagcatcatcgcatttctcattaatggaagggacataatcatccataggtccatagaccaaatcatcaacatcaacatcaacatcatcaagcaaaataaatgtttcctagtcaactagcccaaatttcacaatagtagactttatccaaaaagactaccccaaataccccagaactatctccaactcatatatataagttcccggatacccagctggccagtttggatgaaggatgaccgacatcggtgatttaaaggaccagcgcaaacagacccagaagcagactgccagaagggggcatgaggacggcagcagcgttcgaggtggtacttgccgactccgtagcagtcgatgttgtggtcgaagtagtcttgtgagtggtggtcgaagtagtgctcgaatgggttgcggtggacagactactcgaggtgatggttgaagatgaggtccattctatggataagtcagtccctgtttctttcatgtagtgggtaaaaacaaaatgctgtctcggaagctacgctttccgcctttactaaccaggggtagtggatgtgtgggtagaaagatatgtggtagatgagatagtgcttgatgtgatgaaagtcgaggtaggaagatgtgtggatgtagtaggtgggatagacgacgtggtaatggaaatagaagtagtcggggtagtaaaggtagatataatggaggatggagttggtgtaatagaagaagaagttgcaattgtagaaatagaagtaactgaggaaggagtgagggtggtaagcatcaaagtagtagtcaaggtctcggtgtaagaagttgtaactgtcaaagtagagggtgttgaggggaaataagagggcccttcaggggtggaagtataggttgaagtaatagaagaataaacgaaagaggtagacgcacttgcagaagagctagttataaaagaagatgttgtaggggtagaaatagaagatgaagcagtagagtaataggacgagatagggctagatgcactgatggaggtgtgagtagcagtcgaagacaggtaagaggaagtagtcgaggaagaaagagtcgaagaagtaagatcactggtccacgcggtggaagaaatcaaggacgaggcagacgaagtttcaagcgcagtactggtttccttaccagagctactagcactactagcgatttcaccaggctcagtgactagaaattgctgagactgagctagaatgccgctagtcggagagaggaagttgatctgatatcccttcctaaattgctcatcagtcagtaattcaaatagaatgcaatgaaattgaacttacccatcatctacatccgcgaacgtttttgctttgacagtgtaggagcccttggaagagtctacatcatctgccacaattgtcgttgtcggagggtagacattctgattgaccagttcgatggtaaaggtttgcggatccgttctattaatattgtatttctggttagcaaattgccagtgttcataaagcactgggataactagcagcttacgagacggactgccacttgatagtaagaggcaggtcggggtcaatcttctcaccaatccggggggaagtgacagtgagacctgattcaacggttactatattgattgtattcccgcggacgatatttcatacctgcagctgtagcagccagaaccgccaggcagataatattcatccgcatattgattggcttcaataatatccaatatggggtgaagtattccaaggaaatagttgtcaatcttggaaggtcgggccgaaatataatattcgtgaggttggaggaagtcaaagccagtggcgatataagacgggaacatggtactttatagccccaatgacaatgacggtggtagggggctgtatctctcacggggtcttctcaaatttgaatggcaatctttatttttggactgatttgccgtgatgccttgatccatcacgcatcgtgctcccaggtgtgtgtcagagtacagaatagttaggtgacgaccacactttcttgtccccgtggtgtgaatctactagtgcgttgcagtcaaatggatcttgaggatcaaatgtgcattctgtagcttgcaacttcattttcagcccatatgagaatttttcgtcgactcaatccatgatgtacaacgtctggaattttgaccggccgcgcgtcatagtttttgtccgtatcgcaatggaaagatagatttcgtaatacattacttgttcatataactacttaacgcagccatagtcattggctagggcacgggacccctaggatgactgctgcggcctgtttagattcgataccgaatggcagggattcatgggataattgctcttttcaaacgtcttgagtgccgataatgcactagaaggtcttttagctataaaatgccctgggagattgtatgtatcaaatatcttagatcgattgagcttacatggaactatatattcagacctgtcaacacataccgaaagcttattcgagggcaccactttatggtcattgagtcttattaaatcgacaacttattagacgtgggacaacaactccgaaaggtctagctacatcgaaagtattgtgttctaggtactctcggtcgttatgagcgtaagtaggacaaaaagccaagggaatacgattttcaacctaactcccggctccacacacggaaatgagaagaagctggtaagcaattaactcctcattttgtttagatttactagtcagaaagcaatcccgcctccacagaggctttggtatttcaaaatggttgcctaggagaggtcttggagtacataagaagttgcacgaagcatgaacataaggtcggaacagtgcttattggacaactcttgggagatattaaaatagtccaaatggtatctaggttgcttgtcggaacgaattcttgtcttgactgtcgtaataaaaggtccccgttcaatcttgagtatctatctgtctgtgctctccgacacttccaccactgtcaggccaagctacgtttgggttcgcagtgcatcttgtataacctattgatctcaagagtctcagtctggtccttctagagttgagagttgtcgtcagcattctccaaagcctcagatatgacgtggaatgtccaaagggatctaaaagcattatcggtacggagtatagtcatggtaaatattagtcttacgaatggactatgaatcatcgagatttttattgtactcagtggatgatgcggaaagaagtctgcatacaatgaacatcaagacataatttcaagcattgtattgatcacctgtcacatctaagtaggtagcacgtagaatccacattctagatagtctaactaaagcggaaatttttcatgcacgataaatgcaccttacttttccacttcaatccggggaacctcaacgctcaaggacactgcgaccaccgtcgacagtgatcctattccgcactcgaatgtgagcgtacgctgttccgagctggacaacgcgatccaaagtaggctcatctttggcccgagtgctgtctgcagaggacgagccttcttcactaactggccgatcggaagagatgacacttgaagcctcctcattctctttggcattgtgctttgcaatgtccaacagcgctgttggacagaataccagagcttcaccagtcggcaaacgaacaatcttgtgaaagatcgaggccgcggcgtttgcatcagatttctcaataccagctcccgcgatgtgtgactttattgccttgaaccaagctggcgacgagaagcgatggataatagtcacattgcacagctcgagaagtgacggtgaaagagtcggttcctgtgtggctatcaagacgcgggcggctagatgtcgctgctggcggacgacagatagcagtgtctccgtcagatctgcggcttctgtcgacgttgaggtcatgaactagaatcaaattaagtgtcagtataaaagataatagatgactcaggaaattaggaagggccacaaaccttgtgtgcttcatccagagcaatgatacgacctgtgtctcggcggttcttcaaaaacagggaaacggcgatgttgaagagagcgcatgcatcttcttgaccaacgaacgggcagctcaaatcaactattgtcaaactgcccggaggaaatttccagacatcatcaacatcgtgttgctttgacttgttgggacttgcaccaggcacagatccaggttcaaaaaatgactcgagcacctccaagcgcatattcaaaggcccgatttggcctttcaagaaagtttcacgttgcagaatatttctgaacgcactataattgaatccggatttcccctggttggctatagccatgtctcgaagaatcttcatcacaacctatgtgagtagcttattagtacgttttcagcttgaatgaaaggtgtgctgacatacctcaatgtaaagaggttgctcggctttgttgccgatgcccatcaaggtcttcatcatgccgatgttgagatccttttgtggcagatacaatggcttcaccgtcagcattttggaaccgcctgccagtgttttgtatgcctttttcatggcaaggtagttggtcggggagaccaaaacttggacaggaatgcctgaggagtagagataagctgcctcacacaactgcgtgctggaaaatgcagtgaaattgtcatagtgaatgactagtccagccagaggtgatgctagcttcccagctggggaggatgcaatcaatgcattttccagaaggcaggacagggtatgacttttaccacttccttgactcccacagatgaaggcagaccaaggcgctgacacgtttgcatacacaagatcatcttgtgtcggtgtgttgctggaccggttacgcagaccaagcagtccatactgtggaaatgtgtctctctcaagagcttgatcgctatacagacggtcggtgtccaggacctgacaagcagagagtgagaatagaggtgccgttatcagttcctcgtccaagcgggtgttttcgtatggcgatgttttcgaggaaccagtgtcccctttgacaagcttcatatgctcacctatctccaaggtattcatagaaagttggagagactccataatgtaagctcttgatggggatagtgggagctcgcggtggagacaagatgatgagggttgaacgagtcaaaaagaaggcaggaaacagttgaatttaaatcaaaattctagaataatctaatgtcaaacatcacagtaaacttctagaatgcctctgcgatatgtttgttccttctatcgctgtatggatttgcaggactgcattatcatgcaagtgggttactctactatttgcttcatatctccgatactctgatagtacaaggactcctatttcacccctggataggaaattgagcctaagggtataaattagaagcctcaagatgatcatcacggcccaggggtgttcccgaagccacaaaagcttggcagcggatgcatagaagaaaacttggacacgtgacatatacgtaagaagaccttgtgatttgatatgcttcgcttcgctccgcaatcatgttcaggggagacttcctcatcatttcaaaattgcgtgttctctctagatcattatggcaaatcagacgaacatgttccctgcaagtgcctctgacattttgtcgactcaaccacacgatggctggagaaagaatcgaagcacagagcttaccacggtatcatgaaaagcattactacccggtaaaaattggcgaggtgtttaaggaccagtaccgggttattgcaaagctaggatacggggcgtatcccactgtttggcttgcctgggatcagaggtttgcaaatcctacttatcctatctgtttctgaatactgagtattcacgcactctttagggaagagcagtatacctcactcaaagtatgtattagccaaggtaccgacttttccccgattcttaacgagatcaacatgctgcggcgcttgaagagattcgcggataccgatgaaggcgaccatcccggggtggggtttacgcgtcttgcagacgatatctttgaaaatgatcaagcgtccctacatggccgatactactgcatcgcttcaaaacccgaaggccagagtattcgcatgttacaggaggcgtttccaaatagtatcctgcccaagcttctggtgaaatccatcatacactgcttgtggttttccgtcgactggcttcattcagtctgcggtgtcatacatactagtacgttcaaatgaggtagcggcaccttttgcatctcccacttactaaactgtgagcagatatttcacctcaaaatgttctgatgcaactcgatgatgatagctgcctcaaggaaatcgagagccaagagtcacaggatcctagcgtccctataatgacgactgatggagcggctcccgtatacaggtctcgacgagctaggatgatggagcttttaggtgacccgattcttattgattttgggcaaatgcggctagcagaatgacagactaaccaggattggtggatgtctgatttgtataaagctccagaggtcctcttaggcctgccttgggagtatcctgttgatgtgttctctatcggtgtcatggtaagtactagtacacctaaactttgtgatactatgtctaactcaggtccaaaaccaatcagacacttgagctcacggaagggaagaacctattcgaccccattgaccgagtcaacaatcagtatgttcttccgttggcactggcccagtatatcggatatctgggtcctccaccactggagatgattcgcaagagtccactattttcagcatattttgatgaacagggtaagtctcccttgaaccctaggcttcacagttgagcttaccaaagcttttttataggcaactgggtgtcggagccccccatccccaaaactactttggaggaattcgtcactaccatcccaccaggagaggaaaaagaccggtttctccggttcatacgcaagatactaacgtgggatccggaagtgagggccgactcgtatgagctcatgcaagacgaatggatgatgaggcatgcttcagagcaagatctggtggaattgaagaaccagctgttttcataggatcagaatgggcgaacaatatacgtactgtttattaacagagcgcgttgaggattgctttttaataatatcctggctcaagaattggagcgcttacatgaaatctctacctagaagtagttaaatcataatcaagttttattataaaacaggaccgcccagcaatcagatgccgggtgttcaaaggcttgatttcattgctcagatgctttttctttggtttttttaacttatcatgtcctaattctgagatcttcatcttctaggtagaagatataaagaggaagaaatgacagaaaactggaaatatgcaaggcaaatatgaggttgatcaaatttttgtagagagaatgtgtcaacatggtctttcggtgtggcgcaaaacaaatgtaccagtctggtcaattattgagtcccagttcttccatagtcttctccaaggtcgtcttcatgaactccttcataaccaaatcttcaccacaaacggactcataaagaattttggaggtgatgttgacccccatattcatcaacttactgatgagtacgttctctctccgaaggactgcataccgcaggatgggcccaatttgagtaatatcataaccagtggcaatgatcaaatcaatcagcctcctatcaccaccaacgagcgcagcgtggagggtattggggatgaggttcgaccagcctgcggtggggatccctcgaactgtcactccggtcttgtgaccttggaccaatcttgatcgtgttttctcggggggatcgtctgggcgtagatctggagcgaaccgcaacacgaactcggaattttcgtcattcacatccgcaccctgttggagtgcatacctgacaacacttactttgctgtgccagagtccctcgtacaggatgatctgggcagcatctttgacggtgagatttcgatcgccactcccaaggaaagagaacagcgccttgagcacgggtaaatgaccgcgagccgcagcaatcttcagaggtcgtcgcaacttgaaggcacccgtgaatgcgagagcatcgctggaaagtaacaactcaacgacattgacatggccatttcctgcagcctgtctcagtggagtttcgtaatgttcatccaacaagttgggattgacgcctttctcaaggaaaagattgacgcaagacagtgagccaaattcggctgctgcggtcaatgggtgtgatttggggtgccgtgggatgacactcaaagactcgggtgcgtcgcgatcgatcaaatgagacctgaatctatctcgccgtggaattttagcgccagccttcaggcacttgtgtatggtgccctccaggcctcgcttagctgcccataggataatatagctgtgttcctgtgctgagcagctcttgtatagtttctcgtcgaacatgagggcgaaacgcgggctcgtgcgaatcaaggcattgcggtctttctgggaatgcagattcttctcaatcatgagaatgagctctgtgggtagaatatcaagcgacatgatcgctgtcgccagaggcaatttcgaagtactgggtgctgaagatgtgacagtcgagggaaagagaatcgagatgaagggtttgtaacaaagatgaaagaaagattggctagaagaataaacaagttgccaagcagagaaaggaatccaagatgagatatgagcgggtgggagatgagcacttgaggttgaggaagagagaagaaagttgagtagatagggattttgagcagataaagtgcgagtgatagtaaagccacaatcacaaggaggaaaatcagatgaaggtggacaatgtatagcaattgaggcttgttgcgtacccaggtggccttgtttgtcaggcgtctcccactttctatacccaaggttgtccttgaggctgaattggccgtaacctacggtttacctagaatccaacttgtttatattattcctattaataaacaattgagcattggaaacatttgaatcaaagagatatgtgctatgagtcgaccttctaccttagtcctatgtaaatgaactacttctgttaccattagcaattcaataagaccttacctatataatatctatgggttaagccctcgactactttctaataccgtggattgttcgagaatgttattctctagcatataatccctcgccagagacctgatccgccagcgctattaatgcaatctccaaatcaccgggtccatcgacttcaacattcgtcctagcctgattataaggaaggtattggtgtgagttgtgaatgccacgagaagactgggtgttacgcagctctatcctgaggggacaaaaattgcattcgcctgagcagtcaatcctagccgtaaattctcactcgcctgttccagctctttgggtatattcacaacatcgcgggtcacaaagtcaccatgatagtcaatcaaggcggcttccaccattgaccgcagttcgggatctgcagtaacggcccaagctgccgagagacacattatcacgtatcctgctccaacaggtctgtaaacattggacttctgagcatgttcgagagtttccttaacaagagatttcgattctaccatgcatgtatagtcactgggatccaatgcctggagaatgcaattgaaaaatgtcgtgattgcgagaccaattccatgggtgcggagataatgtgctctcaagatacggcccatgaaggtttctgtcatagtgagcccggacttttcaaattcgactgttcgtacttgcaattcgcccaggatcaatttgcatttttcgtatattggtcggacttccatcgtcaatagcatcaaatcttcgccatcgcgtatagcttgtttgccgcgtctcattagaactggggctcgcgctagacatcgcaaaatctggccttcgggttgatcttgatcaaagtcattcttgactaaggaatcccactcctcggagctcaggtcgatagcatcattgtataagccctcgaataacttaggtatatgattagcttaggcaagaaatgtggtggagtcgtgtgtggcctaccacgcttccacgtaaagagaggaacaatttacgctcaaagtcatcgcgtggcccaaagttctttcgcgcgtgcagaatgctggcggccccttgcgcatgtcctgatatcatttgcccattatttccgatgaatgtttggcagaccaaaagtatcatgacagcacatagtgtgctggaagcactcgcctggactgggtggtctagatagactctcagggtcttgagcgcatatgaatacttggctagtgtctcagccgaaaccgattgaccggtgcagaagcctgcgtgggcagtggttacagcgtcaactgcgtggtcgagtgcttcgttgctgccgagtcgtcggggtatatcttccaggaaagtgccgaaagcccaccacagattgtaccggaggtcagtggatcgttttatggcgccgacgaacgaattggtcaacgacatcatactattgccaggacatgcccggggtatttcaaaagaaaaaattactttttctgttgattttgatcttgatgtgagagtcatttgaccgcttcgatttgatttgggggaaaattgttgctctttgaacttgaatcgttgctgaccggaccccacacagctcactttcagacgaagacatcgtccacactcaggttgtttctcgtcacacttggcatattattaagattagcaacgtgtgatatagtcttatggcacgtacctttttcttctgcttgcgacacgcgtcacaggcccgacctgttgggacgcccggcatggtggggtgaagacctgagtggagaagcggagcgtggatctcaaagcaaacactggaggctttcagtagcgcgtctatattcagtgcggaatacgccgtagacagctacaaaatcataatatattgcactaaaaaaggctctaagcaactaggttgaggttattgcggctgcccagtctaaccgcttcgggtcaaatgtaccgctcctcaaggctgagttgtacgtcgctgattggccggtttattagctataataacaaggctgaattgctcggtctaacccgatatgaacctatagcgcttcacgcttcattttgtggagcatcgccatttagcccgccaaaagctacgctatgtgtccagatggtcttacggagcgcatgagtgagatatatatttgatcgtcatacctatcctcgtgacatccgatattgcacccttatttacagcttagcttgttcgagagggctcagctttctcaaaggaggccctcctctgcttccgtcacctgccatcggccccttcgagtcacctccctggggcgggttcatcctccacttttggcgcaaagcttcaggtgctttgttctcaaagcagtccgcgatatactggcccaggatagggaggaatttgaatccactaaaaccaggttagttaatataaagtcttactgtgcaaagtgatagttccatcaacacttactgtcctgcaccaccagtagccatgaataggccctggatggttgggtggtggtcaataataaagtcaccattaggggtatccgtgtaccagcacagtcgacggttcatccaagggcgttcccccagcttagggaagaactgacgcaatccctttcgcagcgattcatcggcatcgtcgggcagatatccagtggccgcattgctgctttcgagctttggcgatgagagtgacttctgaacaccgtccacattgacaacgatatcagttgcatatccgtaaccgtggcgtgccatcttgagaacatttgtgtctggtgtgggcgggaacgagaaaacaccagagctcatgttaatcatgaccgggatctttctcatctcgagagcctcctcctcggtcaactgaatgaaaccaacaggctggccagaggaagatgccacatgacccatgtttacaagacggttggtccacgctccggtgctcaagatcacctgtgaagcaagcaatacctggcctccaacaaggttgacaccaacaacgcgcgaccccaccctgcgcagggagacaacagtaccgcgaggcccggcaatgatggaaacgcccgcgacagtacacttggaagcaagcttctgaatactgcctgcggcatcggcccatccacctttcggattgtgatatccgttcatgccggaaaagtctgcttgaacactagggtaaagtttgcggatatccatggcgtcgtcgagatcgtctaatttgccacctgccgcccgaatgatagtcttagatttctctatatatgcattcttgggcgtttccgaaaacatggcgaatcccgattcaaagtattgatctttgtactcggtggtccatccattgtatgcttcccgggccattcgagagtagattgggtcggcatagtcagcgcgaataatgcgcgagatgtcaacgctgcttccatctgctgatggtggtacaaatcgatcgacgacggtgatatccgtatatccgcgcttgttgagttcaagagcggtcgaaagaccgaagacgccggcgcccacgatcacaattgagtctgtcttagctgtagtcattttgaagaacagattgacagccagagggattttgtcaaattgcaatcggttggaggatttcccaggattataaaatgcagagggtgtcggtaaggaaagccggttcagtaccgtcttggcgtccggcaaagtcggatccggtccgtgttccccggatcggaggtagatatgcatagaatgtttacattctaaactcacgttgggttaacgcttagccaatcctcaaacgccctcccataatcttgaagctgcaggaacaaggtatcaccgccgctaaagtccatattgggatctcccggaagcccggaaaagtccatcctcggtgaggtctgactcggcgtttgtataggatcttcagtctgttcaggtgggtaggtgacgcactcgggagccactgtcttgtgacctgatatcccagcagatccaatcaaagcaaaatcacgttcggtgatagcgccagccgaaggatccccggagcatccgacactgtctttggcaagttccgggccaaagatgtcactagcaggatctgatatattgctcgcatgggcatatactaaaattttccataataattgcaagttcacagaccacttctgacgggagttggttcctgctggggcggtgttgtctgtcataaggcctccaggggaaacgctgtcccggagttgttggagttgtcggacctagaagtgacatcaggacaggtgtgccaaagaaacagcttggaaaaagaactaacctgtcgatcaatgtgtggccaccgacaacccatattgcgtaggaatctaaggcatttctcaaatcccgtttgcgcctttctcttaaaagcttcatcctcgacaaaactatgttgaagatagatcgtagcgacaattgccacacattgccctaaagtcgggtcagatacctcgaagcttttggcctcgataagctcaagaaaatgaatgacccagcccgagtggaaggtcagctgctcgaaagaattccggaggaatgactgaggcattgtcctccggaagttccgaagtcgcatagataaaagaaacggatggtttactaaacaaggcaccgcgtgccaaaccaactggaagaatagccatgggctccaatagtcacgatgagcctgaagttcggcggggggatggtcttggaaccgacttgcatgaagtcggaacctaagtggcatgagactctcatgctcacagtgtcggaaatttagcatggcgtactcagaatttggagaccatgggggatgagcgtcaacgcctacatggcttgcggcataaatacatgccatcgcccacagctcgcttgtgtaaacactgctaccattgatgccaatatctggcttggagtcacagctggtaccataggcgatctctttgttgaaaatcatggttgccaatggagagacggtttgaccaggctctgcaagtaagtccaagctgtctccaggtggatgtagggacccctggaggttcctaagcatgacaagacttacatggcagagcttccgctcatcgcgctcagtttccaaattgcttagagactccaggccatttattctgaggtttctcatcaaatatgtggcaagtgtggtataagaccccgcgcgaatgatatgacccgctgaacagatggaatacaatgttaggaatagacacaagggcacgggccgggattgctttacctgtgaactccagcatacttagaaggcatagggtctggatagtagatagctccacagtacctgatgccaaacgcatcatgaccatctgagaggccctttctgtttttattttgatctccagttgtatatcctggtcaatgatccctggtcttttgaaacggactccaagagcttcaattgcgagtagaagctcggggtcccgcttccccagggagactagagaagatctgtgggggaataacagaaggggctgtgcgttacaaaaggtcagataaagttcagcatctgggatcgcaggtgatccagctctatttcatttgttaatgaatgtctcctgcgagtatatcccaagttgaactcacatagaaaagcttgccgggggtggaagctctggtatctgagggttattctcgggaacaactggcgaagggaggtgatttgaggcaggtcgcctacgagttcaatcagccaaatggaacgaaacagcacggaaatcagaactgacgtgatatattccaccaactgttccagtttcccctcaatgccggaaatgcgttgctcctatgccacattagaatttgcttaggtctggacatcaatgctacttaccatcatcttctgcgagtgcaccaggccttcatctacaatctcagcgcctgcatatacgcattgttgacccagtcgctcgcagtacgagcaaatcggtttctcccctgggcaacgcgactttttccggctgcgggaatgtcagctccaattggctctcagcttaggacacctgaggttcaagctcaccgacatggctcacaagcctgacggactcgttttgatggtctttcatcttcaattgaggccattttgcaaatcatgataaaaaaaaagtttgacctgaactgttccacgcgggtaaaacgacgatccaaggcggggaacggctgtgggtccgaaaacgatacatatcaagtacaatatagcctccccagcttctcatctatattcctctatctacgctcgatgggctttgactgtgagaagaagaacagaaacaacacccgagggcacaattcagtgaaagacgtgtgggtttggttgagacatcttcgggcactgtcacaataatcccaaatgggtttcaaaagcgccaaacttgggtgtttattctacactcattcgagagatggtcgcagatatcagcatgatatccaattgcaagatcactttcctcttgatcatgagctatcgctatccgcccatcatgaaactcgaagttgcgtacaaagtggacccgtattatagatcatgcgcgaatgtgtactccgtacacggcgtgctatacatagcactgggatgtatatctgtgacctaaacagtgtgagactgttcaactctgcctctcaaagataatataaatgcaaagtcgtaatttccacatagtgaagatctacgatcatgtgatctgatctgccactaggctgacgtcggctccgattccccaggcttttggccactcctcctcatttcactgacaattctcccagtctcggcgcgctttgcattatttcgaataagcatccttcaagattgagggaaacttgaaagtatcaaaaatgagtgacgcctacgaacgcgagcagtatgtccccctttctccaccttgtcccatcggatgtcgctatgaaaggagttatgcatcgatttgaatgctgattttgaaacaggcagaataatgcgctcctcaattccctctcctcgaaggtctcagctctccggtcggtgacgattgatatccatgataatgcgcgggatcaggacactctcgaccatacggtatgtcttgatcaatctttcgctagtccgataataattgagggcatgtgtttgctacttgcagatacctttgactggcgcctcggtcgggttaacttgcgactgacaatcttaccttcttagaccgatgtcttctcctccttctcgacgaacctcaaaggtagcgctactcgactcacgcggatggcaaagcaaggcgattctgtggccgtgttgaagattgcgggcatgtgtattgctgcgggtgtcgttctctatatcattcttggatggatcttttgaaggattcttacgtctttcgaacctgcttctccctcgtcaccctttacccatgtccccctcgatactcgacacccttgctggaacgagactcgtatcgaaaatacataatccgatgctatcatgttattccatcgtgctgggctgtcttcgtcttaccgaccgcatatgtgtttgactcgatttcaacatgacatggcaccttggtttgcagtgtatgctgtgccccaggatttccccgtcgttctcgatatactcgtcgttctattttcgggctgtgcctgttatagacattgttcctaagagcgtcggccacgcgactcccaccgcctcctttgacccactctggtcagccctgaacccctaggttctcttgattgacgtcttatgatttgcaaattggcccaagacttctggttctggtctcttccttggagcagccgactctaagtctcattgcgacttgacattttcgcttcttcccacctttccatgtcattaatactgtgattactcgtgaacataatacatacttggagccagtctcgctggatctgctcagccatgctctactatctcgttgcgtaattgaagcgcaccatggatcagctggatatatatactaggtggtaaatgcaatccagtggcacatgttgacatcaccaccaagtggtccattaccccagcttaatatatttagatcaacgcctagatctctacttaaaaaaactctaatcgacgatcgtgagcttgagctcatctgcaccacggtcgaccgacaacactaaccaaaaacggaaaccaggtagtatagacctcggatacaatgagaggccaattcggatttttcctactccggtcttcttgacattagttacatgtagcagtttactatcaaatgaagtgcatttataatgttgaacacttgctctattgtgtcgtgtgccacatttccacgtgtcaatatcacagggccgttttcggccaacatgtcttggaatgccaacgtaagttccggtaaccaatctcatcaaatagtatcagacttgcagtttattcgcaatcggtcaaggccacttgcctcattggaccccattgtttccatggccacgacccgatacagagggtgtcatgccatcacggcagcaaccgtcaccctcggtaaatcggttctcattaaacagtcagtaaacttagccgttgttaactagtgcagatactaagaagggaacattcttcacgggaacctgccactggtaccatagtactctcgattggaacattatcggcaccaacagaagctacctctagctgtgaactcattcatcgagatccgggagccggtctctggtggacaataaggtaaccttcgatgcaatgtatagccaagctgcacttccatgtgtccggcctgcgcttatatccttgttgccgaggtagcattgggattctgaattcgaagccggctgtgatggatagccgaggagtacatacccatgacggtattcaaagcctaagcgaaacagaaaccagctctcgttttcagcagccgggtgtagtcgtctccctagcttacattagccctcgtgggtaggtagctgcgacatactccgtagccgatgatatgaagtcgtcgggcgttctcgggtatgctttgacaagatcttccaggtttgacttgcaattgcacatgttctgtctttggggatgatggatgtttagaatatgagaggattgaaaaagcctcggctctgttgacatgaagtccgatctatatgttgtatatgatgtgcatcacacgccagatctagaccacgggaacccccgaaccaaaaaggcccgaagaagaccctgattgcaccgctatgtgaataaattccgctgtacaattggcccaaccgaggccctcgtaagccgtaaaaagtcttttccggatcttggcaggcggtcgatccacgcgatctcttttagttcccgctctagacattgcaacctcccctggcgatcactggaagatagctggtcatactctactttgtattcggcatgagaactacgcaaaaaagatatatagcacttgttctgctgcgcgtggatgcatgtaataagtacttttagtatgccctgtttatcaggtttcatagccgtgttttcttgtgttttgtgttgtttctttcggttttatttggtgggtcagatctcttacgatgtctggctttagcaaatactattggtacaccaagacgcaaagaccccttgacgtgcttcttatctagccaatcttgaaaaacattaaccgaagtgataagctaagcccccagggtcgaatgaggcgtttactgatgttctgtaattggcttaacttgctcttggacgttgaacatggaaaatggcctgatgcaaatcatcggaatacatttagggttcaagcttttacatgcaatgctagccgtatatgttgtacagtgcgttgagcggtgtaacatgcctagtttaagattccgacagtgaatcactcacgatgacgacatgccttcaataattacaccgatgtctactccgtacctgggtatgtacttccaaggttatctgcatttacaacatacgcgtaaacaacgagtcccacattattgacttttcttcggcatgatgcaatccaagtggacgttctggaactcaccgaagataatttcacagtggagagtctgtaaaaactcaccgtcgatgatctgcttggtggggccgtaagaaaatctttgaaagttggtagagtatagctctgaccctagtcatgttgagtgctttatagacttcgaccgtcctagccgagacctcgtgatggtgtctttagccaaaatgaatctaggctttcagggctggatcaaaagattagattagagcgggtcgcacgccataggaacgggtcttgtccagttggtatcaaaaggaaaaaaaaagataaaaataaaagtcaaaaacaaagtttcagcctaaatcctcacaccgagaagcccagtataaacacggcgaataacagcgcatatactcggggagcttaaatcggcacgcaatcgggattccgatccggtgaagcggaaattcccgagttccatatgtggaaggcatcccgatcccagggctaggcctgcagtcggcttgtacgatcgggagcaggccgagtgctggctttcatgcactgcactttgtatgtgtatgtacgtatggagtatatacatgttacatgaaacacgaccgcagaagtgggtcacataaggcaccataatcaacagtttgtgtgttgtttgtccgagatcttatctatgtttggttttacccttccaaggttaggtgaaatccctcacaatatatctgacccgctttgaacctatcacgacgccacgggccttgacagctaggcggggtctggttagtataggcggttcccgctcttaccgcaatgctcatcagggactctacaatatagtgatgtaagtgttgggttacagtaggcggttggatcacagatatttccgattattgccggtgagattaagataggtcaagcttagcaggtcaaagtcaaaggtggcttcatgcatcaatgtgcattggggattttcaggcacggtaactacagcttacaggaagagacgatcgcatttgaaactgtatttgtcagtgtataacttatctgagcaatatcggagtggcggcagttcaatgaattgagaaagaccaagggtccaagcccaaggcatattttttaacgagtggcgcgatcgagaccctagtagacaaggattatgtgtaccgtgactggttaaatgcagccttgctaactagtatactttgtagatctcctatttaccatcaccaaagtggattttttagttgacgatcaggttctgaagtatgaaataacgctgttgtgtgactccatgggcatacataggtacgttgacgtgtgcatcttcagggatcttgaaaccatgcgggaagggcgatcccgaggtatgtacggagtatgccgtacaacatcacatggcatgatggataagcgtatgggtaaaccctagacgctatagttagaccggggtgagttgttgaatggtttcggatgtccttcgtccatgtcatattatttggattttgttctggatacagaatcccttgcatttgaaagtaaagagactaaataggcatcaaatagtaaccacgcgtacgtactttgtaccttgtagggagtaactatgtagggtctggtatgatagcgctgacgtaaaaaaactagacactgatgggttttgatgtgcttaaccggttaagatggttctaaggttcttcacaaatctcacaaatcctttaaaatcctctaaatcccacttttgctccaattcttatatttctcttcattatatgccaagccagccttacatcgcgcatccgtgagcctatttccatttgagattagtcatttcgcatctcggcactgctaaaggccccaaaaagaataaaaaggaaaaaaagaaaagaagaaaagaataggtcgccggaacggcacaactccactggggacccgtgagtcggaccagtcttgcgtatctggccatgttccggtagatcagtgatagagaaaaaacggaaaaaataccggtgccatacgccagtacgcagtaacgcagtacggacggagtacacttactagccttgatctctttactcttgcctcttctccttcttcatatttttattccctaacttcgtcgacatctccgcccattgctgcgggcaatttccaaatggctctcagcttctttagtagtggcgggagcgccagcagcgccaagtacttcgacatcaggtgagtgggggaccggatagcccaggcgagcgacatatctgacttctacaggttgaatgatgagtatatcgtgttccgtggcggcgaacatgaagccgccagtgcgcatctgcggggcactctggtcctgtgtttgtccgagccgctcaccattaaacacctccggctacagctgacgggcatgtcgcgagtttggtatgtgtcgcattcctaattctgaatcaacaccactaacaagccatttgcgcagctggcacctcccctccagcgcagccgccggtggccgaaagtcatggcgtgaacgtgtgttctatgagaaaacgtggaaattccgggacctacccaaaggaaaaaccgaggtcctccctgctggcaactatgagtacccctttgatgtggtacttgagggatccatgcccgagagtgtggaaggccttgccgagacatgggtgatgtaccgcttcaaggccgagatcgggcgcaagtacgtcaaggacattgttgcgcgcaaaccgctcaggatcatacgaaccctggatcctagtgctctggagctatcacatgcaatggtaagtggtcatatcggcctgactgtcagattcttactgacaatcctcccagtccgtggacaacatctggcctaacaagattgaatactccatcagtaccccgacgaaagccatcgtgttcggaaccgctatccacgtcgatttcaaattgattccccttctcaagggtcttcggatcggccaaattacgtcacagctgatcgaaagccacgacctcaccctcaatccggaagaccccgattccattcgcaacacatacaagaccacaaggacaatcttgagcgacgagcatgagctggatgagaataacattgagatcatcgatgaagcggcggaaggataccaatgcaagcgtatcctagacatgccgcagacattgacccgctgtctgcaggatacagacaccaaggggattaaagtccgccacaagctgaagttccggattcagctgcacaaccccgacggccacatcagcgaggcgagtaatagtagaatccctggccattcttctgacaggctaacatctcaatgcagctccgggctacgcttccagtttcgattttcatctcgccacaccttgccatcgacgacaacaacaaccttcttgggcaaacccctcaatctacccggatcgccgtcgatgagtttgcgcaccaggcgcctcccctttacggtgagcacacatttgatcagctgtatagcgagctggatcccagcggctatcgcacaccaggccctgccagtagtccgggcacgcctttcactcctctcagtcgcaacatatccacagagaacctcgcctccatgaacgccctgaccaacaccgatatctcagcttcggcactgcaccatcgtctcacaaacctgaacgcaagtccgctccaccatcctatcactcccggtgcagtcactcctggcgagggcctgcatggatctcaatccccaacagacggaatcccaattaatcgccaattgggtgtctctaatgactacttcggaacggcttccggatcgaaccatggcagtccagaactctctcgtcggccatccgacgaagtggagcccgaagcccttccctcgggcatggcaactcccttccacccccagtacgacgaggtagagactctcagtcgggttcccagctattcgactgcagtgcgctgcgccgtgcgtccccgtgactctggtctccccgattacaatgccgtgattgctagtagcctccccacgctaccagtcccacagtctccccaacaggctcatatccgcagcggccgtgcaaccggaccgggaactcccctagaggtgcagaatcgctccggttacttcaattctcgcggcaccaatgctgacgatgaggaacgcagacttagaattgcgcaagctcgcgccagagcatgagatgtggccacggaatccttcgatccacccatgatctcccgccttcactttccatcaaaagttctccttctgcatcggtgctggacactgagacccacgcgaagcgctctatcccttaacccttagccattttctctcttcatcttctccccccatcatgttctttttctacaagcgatcatggtccccagcattagctccccttttcaagcctcagtcccagtcaatcgggcacttctcatccagcattgttctgaatgtttctaccgtccatcagcggcaacttcccatctcttcttacttctcattgccttttctcccaacatctcctttcctctggcgttcgatcatagacgggcaggaatactttcatagacggtcacgggtgttttgatctttctttcacttttttttttaccttacgaatgagatccgatatgaacgagctgcatgacatttaaatatgcctatcagcacgagccatgcatatgagcctttgacgcatgtacttaattactttggtcgacgagatcaaagtcttcgatgctcaacagattttccatctttactgatgatatcatatcccgattaggaaattagccaacgatcttaggtcatcaatgaacctgcgggcccagcccggcccaggtggcatgactctgcttcttcggtcgaaggtcaaaggtattgttcacttgagatagacattggaggggctattggtacatggcttttgccactttcgattatcgacaaatttcatgttcttcctaggctctagtgagtaggtctggccagtaccctgttttggatagtaagcacaacttggcgcctcgagttcatatgtatacattgtagtgtagagccaaggtattgctacatttacgttcgacttgacacgataaggttggaaaacttgaatatttgggtggatatgaaagccacagcatcgagtacccagagtaaggtcccgaggtctaacaggttacaagggcacagtgacctcattgacatttgtcgatcggttaagactgcactctcgccttcatttttacctacaacagaaagataatatccaacatagtggaaactgttggcccatcaattccgtcgcgtaagtctgctcgtccgcaatgatcgatctctactgactagtccagccatagactagcgctcccccacccatcggccgtggtctcacaccagccaccgatgcgaacatccctataattcgttgtttaagccacattatcagtcgtcagctctggttttgacgcggataagataacttcgacttcggttgatcattgtcgacgtcttgaattaggccttaccccgccgtttctccgcgaccatgtccactccaacgagccccgcggatgtgaaactgcctcagcggtctaacaccgtgagcagctccttcactcgtcgtacttctctgagtgacgatgaggctattcccgacggtgatagcaatgaggtttgtatccatggtgtcctcgaagaaaagaagtatattggactgacgatgtatttgtttccagactactaatctcctgcttgagcgtctccgagcatggaagcatatgtgcggatatctcgaggattacttctctgctaccgccaaagtgcagaagtcccagtccaaggactacgagaagatcttgaaggtcagtggttaattcctatgggtgatacccggcactgacgaagaatgggaatagaccgtgaacgaacccctcaaggaggcccaccacttcagtaccagcggaggcggcgtggctggtatgtttgagagtattcgctgcaacacccagggcatggttaccatgtacctagaaggcgaaaagaacctaaagaccggcgttctccccaccctcgagcgtctccacaaagagatcaagaacaagtccaaggagctgagctctggtgctagcaagggagctaaggccgtcgaaaaggcgcgtaacctgacgcagaagcacatcgagcttctaggtcagaacgccgcctgcttcgacgccgccgccggcagcaagatcgagccgcacaatgacccgtacctcctcaagcgcggcatcaaccaccgtctgaacaaccaagtaaacgaggagaacaaccaccgccaggatatcctcgccgtgcagaactccttccagcagttcgaagcacacgtcctgcagaccgtgcaaggcaccatggagcaattccacctgcacatgaacgggcaactcgagcgccagcgcgccatgtacgccgacatcctcggctccgcgcagcgcatcccaccggactttgaatggatgaacttctgcgtgcgcaacgacgcaatcctggtcaacccagactcgcccccgcgctccttctccagcatcaccttcccgaacatggagcaccgctccacacagccgctcatcgaaggctctctcgagcgtcgctcgcgcgccctcatcaagggctacagcacaggctactacgtcgtcaccccggcgggctatctgcacgagttcaaggacaacgacgatttccgccgcgacccttccccggagctttcgctgtacctgccggaatgcgtcatcggctccattgacggcatcaagttcaacgtgaagggcaaggacgtttccagcggcaaaatcggaaacgccttccacacgaacaccgagcttagcttcaaggcccacacccccaacgacgcggagaagtggtggaccgttatcaaggaggctacccgcggcccggtcgccgctgcccctgctgtggcacccacgctcgcttctcccacggcgacgtcggccgcccctacctcgcctgctggcattgctagccccgcccgcagcgtgtccggccagggcctcccgcccacctacgccgagaaggagatggagaagaccgaggctgcacaggctgctgctgcccctcctgctgctgcccctgttgctgctgcccctgctgctgctagcccgactccgggacttagccgcacggctagttcgtctagccacttctacacctcgcccggtggctccgctgtggagaagtcgtgatataacctctgtctcgtttaggcatatatatttaagctcttttggttctgtggactttacccccccatatatactcaaataacgcatgtgcatctcgtcagttgattagggtgtagcgcccattcatccacccggagagcgaaacataccttgtcgactggatatatacctctaatgaatttctttccacgttaaaattgcaagaatcagatatcagcgctaactggatcgaagatcctttaactatcaaatacacaaagcaggcagagttgtatcgtcaaatcatatcatagcctatgctggaaatacacatgggcatgggctagctagataatcccagcaagcttcgcggcatacatgttcattgcctagtatcagaaatcctcaggactttccaagtcattcagcttctccccgaggaaacgtcctagcgcggcgcatttagactccagcgcaagcaagacggccggcgaggcagagaggttcaggctggccagacgcgcaagatcagcgctgcggtcaatctccaactgggggtctccgtgaccgttgtgaggcgcgtccagagacgcaggtgcggcagccagtgcgcgcgatatatcaccctgtgagtcctcaagcgtgggagttccattacctacatcaggtacggtgtcaactgcaagggagtcggcgttggtgccgccgttcggctccagtgcgtttagtttggatgggccgacggcggccacgaggactttatccgcgatctgggttaccacggccacggagtcgtcaatttcgaagacgatcgagcctacatcgcctagagacatcgacttggcggtcacgtaggatgaagggtggctggctgggttgacgcccgtcaagttcccgcttgaggctgacttggcgtagcatgtgtaggcggcgccataggttgcgctaaggttgcgcagttggcgcgaggagagggaggagccgtgggcgaagacggcgccgtttgttgcgaagacactataaatagatacagtcattaggtgtatcttgtggtggaagcacagctggcatacatgatcgttgtgatctctggcggggacaggttatcttccaagaggtcgcttagtgcttccgcgtccagcatcttgatatcggggagaccgggaatcatggtgtcggtgttgtcctggcctaccgaaggcgtgtattcctccacctggttcgagggttcctcctgcagtgatacgcgatttgcttccgcaatgcaatctttcggtggtgtccacgagcagtcttccgggaaaaagaagcagttgtcgctataggcctcgtcgtgatggtcgtattcgattggctcgtcggagtagtccaataggttctgagcaaactttgtcttgtgacgggcccagtaaggcagaaagttcggttcgaagggagattgggagataggtagggaaaaagttgtcgaggagcaatcggatattgaatcagagaagggaactggagaaggttcgcattcagccatcttcacacccatggatgcggactggacacgcagagacgacaatgtggggtatgtttaattcccgcagaaaggtaaaacgaataaacagagggcacgagggaagcaggtaagctctcatgccatgggcttggcaagtagatgagagggagtaagggaatacgcagagattcggatccgtcgactcgacgcgcattggtccaaatacaaagtcacgatgattccaatcgcgtccgatggtacacaagaaaaatcagagcaacagagctttatgaggcctggtatgaccagcaggtgtcatgaggtgtgtgtgaggcggctccgcaatgggagcaccatgatcgggcaagtatgaaggaagcgtgcacatgagcagagacttgattgggagaggtaaaggggggatacatgaaaccaagagctaagcgcggcagtaaaagaaagtcggaaattaaagaaaagagacgggatgcgacacgaagccgggaatggaggccaatggtaggaaagggatcaaccgggagcggggggagaaaggtctgaggatcatgcaagaggatgttcacgaacctggtctgcgaaatgtggtaatcggggaattcgaggggttcgaggggttcgatgttgggagttcggaggttgagttgggaggaaggaattggagatcaacttccccgttgatgtggagttcccggacgttttaacaccgaggtatatatacggctgcatacatatgtcgacctaatagtgtagctatcttatgtgtcatttgattgttcaactcggaattgtatattattacattcctacattgcagttcattattagccgtacctaaattgttgattatatatgtacttgtactccgtacaggtttcagattgaccacatgctggacgcctagaagtattaaaagtgatagactaactcacagaatctaattggtctcagtcatatagacaatatgctcctgattctataacttataagagctacctaggtataagagctatgtggcacaacgtcatgtgccccacactctcctcacggctgacaaaaagctcctttgcccctctgtctcctcccccaatgttcgctcgtctttctcctggggtcctcagacaaagatcctttgtaccaatcagtaggctctattcagatccagctcacggcccaattattgaccagttaccaggatccctagcaaccatggcttccgatccttccacctataagctcaaccgttcgtggacagtacttcaacatttttcgacacaatcactaacacaatgggcacattatagacacgatgatgcgggtcaaagatccgcagcgatcggtggatttttacaagttccttggcttgaccttggtcaacaagattgacatgcctgaatggaagttctgcaactacttcctggcgtataacggccccgcctctctccagggtgaccgtcactggactgatcgtaatgccgttctggaattgactcacaactatggcaccgagaacgaccccaactacagcgtggtgaacggaaacacagagccgcaccgtggcttcggccacattgccatctcggttgacaacattgaagctgcctgcaagcgcattgaagatgccggctaccccttccagaaaaaattgaccgaaggccgtatgcgacacatcgccttcgctaaggatcccgatggatactgggttgagatcatccgtcgcgccgatgaggatctcagcaccaccaccgaccctggtagctatcgactgaaccacaccatgttgcgcgtgaaggatgccgaagccagcttgaagttctaccaggaatccatgggcatgactttagtccgcaccattgagaacccagagaacaaattcaatctgtatttcctggggtaccccgcatccaatcccgagattaaggagggtagcaaaaatggagtggcggagtgggaaggtctgctcgagttgacctggaactacggcaccgagaagcaggaaggccctgtctaccacaacggcaacactgagccccagggtttcggtcatatctgtaagtggattatcatacaacttctaattgtttctacaaggttcctaacttgacataggtatctccgttgacgacctcccggctgcgtgcgcccgctttgagtctctgaaggtgaacttcaagaagcgcctgactgacgggcggatgcacaacatcgcatttattctagatcccgatggatattggattgaggtggtgcagaatgagggaataaagcgcacttcaaactggtaggatatagaaatacaagccaatgcatgtatatcaatttccagtcctgcttatcctctaccggaccctgccctgccttcagaacattttgatctcggggggcaagaaatgacggcttaatagcatgattggttcagaaccttggaagcaagccacccgaccaaactcacatggatttaattgcacatatttcagccagaacgccatgaattatgtatagtcatatgtaacccccccttgggccttggctaatgggataaccctatcctcttttgatatacgtacctgcctgacttttgaataccgccttcctaatatggtgcgtccattgattctgccactactacgtagtaggtaccgagtacggagtatttgaattcagtttatagtcaccaacttttatcatatcaactacttcatcgttaacaactgcttcaaaaaccgcttcaacaactgctctgtcattatcaagggattaaaacatgtagggtcgaattagcagtggaggggggtcattgtaaccatccgctaaacgatattgtggggtaaggtgctgctttgggtatatcagtctgagtaatcagtgccatagtgagccctcattggacctccgcttcatcacgtggggtatttgcgcagctgacggactctgaaatttacccagtgagcctgactctgagcgcccccgtaaaagcgcagaggaaatatgtcacggtgacctggcccagctaatggcttgacaatgagaatttcgagaatttcgagttttgacgcgggatgaattcatgtgatttcacccatttcgtcttatttgcggggacacatcgccacacaccattggagcaagccacaacctcgagcttcagaactcttggaagaaatcctcgaggacgtggcctcgaaattataaaccatgtcggctgagccagagaaaacgaaaaaggcaccccgtaaacatgtcaccactgcctgtgtgccatgccgggagagtaaaatcagggtatgtgctctgagcttgagtcaaaaaatcctaaatggcttcaatcatctaatgtgcctgctaccagtgtgatggagccactcctaactgtcagaattgtcagcgaaagggaaaagaatgcaaataccaacatggagacgacaagcgcaagtaagtaccttgtttaatgtgcggaagtgcctaagcgacgaggcagacctcataggcatacaccacttcatgttcttttgctaatatgaactagagtatctcttcgggcctcaacggagctgttctccgcccgcattgaccaactttgtcattttatccaggagcaggggctggtgcccccgccaatgaatccagaggatgaggctggcatgaacagggttttagacaccctccagatcccgcgcggattccctcaagcctcagtagtggccgatgaaaagcgaccggcagatgatccaacggcctctgggggctcaagcaaatctccgtcccaagatccacctgtcgtaaatcccaagggacaaaccccgatcaccaatttggttgcttccggcgtatccccggcacaagatactatgtctaatggaaaggcaccgtcgcccgagggctggaatccctttggattggtaccgggtgcttcggacaatcaaaactttgtccattggggctttactttgccaacagccgaaagtttggacactatttacgccaatctcaacggcgggccgagagcctctgcaatgcctagaatccccctcaacgcagaaatgagtccggatagctaccagcttggcatggatatggcccagcagccgggtgttctgctaagccagctaccccacggcggagaaaatgattcggatagcggcgaagaggacgaagctgaaaatgacgttattgagcaattgtcgcaccgaattggcactttgaaaattgcgggtgatggccatctgcgtttctacggtgccacgtccaacctcaatctggtggatgtatctgcgacacagcagcggcagcggcctgacgcacggactgtgcgccacgatggtcaggatattttaaatcatctccgggttggtcaacctgtggaccaagccctggaagatcatctggtggagctatatttcacctggcaaaaccctagtacatacattgtcgacaaagagatgttcatgacggcacgaacgaaatggcgcaatgagctcgatgatactccgttctactcggaggttctaactaatgcaatgtaagttcacttcatttttcggtgctgaaggaatttgctgacttgttgcaggtgcgcgatcgggagtgccttcgaggcacgctatcaccccacattcattactttccccaagtctctctctgaattcttcgcagaccgggctaaggcccttctggaaattgaactcgactctccttgtgttgctactgtccaggcccttgtcatcatgagctgccacgaaggcgcatcaaatcgtgatgctcgaggttggctgtatagcggtaggcatatatatcttgaagataggaggcaagtaacgctcattggctaattgctttgcagggatgtctatgcgacttgctttcgatcttggtttacacctagatatgacgacatacgtgaacaagggcgaaatcacccagcaggaggccgatgtgcgccgtgcaaccttttggggaagctatgtggcagaccagtaagttttcgtggttttcataccgtcaatatctctaacagtaactagtttctggggcttctacttaggccgcccgttccgcatgaacgccggagacataggtgtttcaaaacctggatctgctctttatcctgaaaaggaacaaaactggcatccatacggccatcaagctgctcatgggctatctcagaacggtctgaggaacccaatggagctaatatgcaggcaatttgtcgttctatgggagatgatatccccagttggtcatattttgtatgtgacttatgcatattatccagcacagtgctaacaagcctttaggtatggatgttccgacatctctcggcacgacctgcaaagaatctgctatcaagtgacggaagatttgtttgcctggaaagcaaatcttccttctagccttcagattgatctggacgatgatacatcgccaatattgcctcatttgatgatgctccagtcagtttgtttcaatataatagatccccagaatcatactaacagtctcttgcagcatgcaataccaccagatcatcattttcttccaccgcccatggctttccaaaagctatatccagccccgcagccctcgtcaaggccccgggtatcaccatgcgcggcgcatgtgcgtggagtcagccaccgccatcgcacgactcctccaactcttcgagaaacactacaccttccgccgcatgaacaaccaagttgtagcgataatattcagcgcagcgctcatgcttctcttcgtaacagtatccagttctccaatgagtccaggcaaacaaagtgacagcccgacatacccccgcagtccggaaatggtagcatatctcaatttgtgcttccgggctctcgatgaactgggccaatcattcgacaatgccaagcgcacccgcgactaccttgttacactccagcgacgttggcaagcaaacatgcgccgatccggctctgcggcgaaacgtcaaaacagcagtgctaatctggcgtcgctaggctcgcagaagccgtctacactgcacaatagggctgccaatgcccaaggaatagatggctcacggaaaaaatcccgtttatctgtttcagaggtccctcccaatatgcagtcaatagcacctgtggcgaccaaccaatactcccgcctctcacagcaagccatgcctcctcatcaccaatatcatcagcaaagctcttatcaacaacaagccccctttcccgtccccgtccccgcccccgtccccgttcctgattcccagctaggcgatctagactggatccccaactcagacatgcgtcttttgtccgagactcaaactagcaacgcactgaatggcatgggccaggttccttctccttccttcgccgaggaccctagcatgctctcagaaatcgcagacattgatggatggtggacatcggaaaattacacgagaacctcaatgccaccatgaaatcattgttggatgaataattacagcattgcagagactcaatccttcgagtctgtcaaatttgtgttgcctggaagatagaacggacatcctatgatcgaatgatatacaccactccaggcatggagggcgttcacataaatgtattattatttccatctttcaaaactggggcctttatgaattctttgcatgcgcaatttcagatgtaacttcgatgctatatgcattgcaaccgattttaatctatatcctccaatgttccttggaacacattcttgaaccagtcgcccacttcctctcccgcattattatcagtactccgaatctgagataaagtaactctccgctccccaacccccttctcccgaccccaaaagcaagcccgccgcatagtagagaccatctcatcagcctgtcgagcaagaaccgtagacccatgaccaccatctctaggcttcttctttttctttggagagagagaaccagaagccaattcagcaccatcctctctcgagaacacccggacccaaggcaaagccatttccaatcgcccaatgccatccccaggtccagaccacgtatccccactgagcccataatccataccatacggcggccaacgcgaaagagccttccggcgccgggtaacagtagcgccaataccaccggtatcgtcggaatccatatcggaacactcccaggtcgacccgtctaatgctgcgtattgatcggcggatgtcgtgccccgcgtctccttcagtacggggacgggatactccggccccgtaagatactgcgggaacgtgggcggcacatcccggcccgcagagcggaggaagaggattggcgaggcgaaggagtcgaagcagcgctctggggttgagaagaatttcgagcgggcttggaggaggggcactaggtctggcggtgctgtggtctttctccttggctggcgcttttgcgtggatgctactcttgacttcggagtggtattatcgcctgcctgtgttttggggtttgtgatagtgctctcgcgcgtgcagtactcatccagaccgggccagtcgcaaattggttcaacagcggcgatggctcggatggagcgcgcttcggtcagacccagcataagagctagagagcctccgatatgtgtgccgaagatggctagttgcgctgggcggaggtgagtttggatccagtcgaatccggccagtgtatcgtggactggggttggatatttgtaagaggtgatttgggggttgcttgatcccagagtttggtcaggggcttcagattgctcttgcgagatagagctttcaactgaagatgagggaatatatgttggtatctcgccgagacgatagttgacggttactaccactgcagacgcagtggatgctaggacatgctggggtgaggccaaggagttggtatcaccagtcctttggtgatcaacttcactgatttcatgattttgaggtgcgctcgttgcatttcccagcaacaaaggtccagggggaaggtagaggattacatttgggccttctggagacagcctctggtgggcgctcggtcgcgtaattctggggatgtagttagcatatatcactagggcttataaaaatatacatgtgtactttagagaaatagccccattgtttccaagaggaagggaaattgtttcatcggtgcaatcagatgaaacggtcgaatatcgcgagcttcggaaacacgcgacggaaattcgggtagctcctctgctgcgacgcagtaaaagggctataccacgggacgagtagataatacctcgcatagcactattacagcatgcacttgatgtttgataaaacttgtcaaggagggttgttggccttgctatccgaaaccaattgatgcctgaataatatggccatctccgtgctatcaaattgcttcgacgaccgcatgtctcatcttgatataattcattacaatctcagtgttatagcattctattcaggactaagctaatcatgcaaaaaagccaaattttcatcgcttgacaatttaaaatgaaacaaaaataccgtatgcaccatgctctaaataaatagatgactgatccaagagtccctccaggaatatgaattttgccgagaggcagtcgccgacgtcgccgacgccgcagggtcatctcggtcgagaggagcttcagtatcatcctctggcacagggcgcacaacctgcagactcaacatcggatccttggagtaaacccgcagtccgaccacacagacggcattccacgggtcaacagaaggctcatcatgacccaccgatggagggtggttcttcacacccgtctcgtcaggaggcatgtcgagatcgctgtcaaattcgaacccttctagtaattcaagatcaccctgatcaagagtccctgtagcaaaacgagcatctaaactggcccgcggagagtcggctctacgtcgccaatcattgtttgcgtgtcttgcgtgcaggccctggccgccgttgacgtagatgctcgggatagaaccgttgacgcggcggtcactgttttcacttgagatgcttgaaacgtcgatggcagaatcttccattggtttctctaccagaatttggctggggacataatcgcgttcgaagttgtgatcgtaggagctgccgctgggggtgcgtccgcaccttgctcgcatccgctcctgtcgggcgcttagcttttgattgcgaatccagtccttctgcatcttttccttaatctcgtctcgaagctttctccgctcagctgctttgaatcgctgctgctcccgcttttcttggtgtgtttcgcctaccagtccctttgcatgcgcgaggtcgtatgaaaggccgacttgcactagtttctctcttctcgtcgaggcaacctgacggacaatttcctcggtcgagtctgcatcttcgtggcggaaagctgtgatcttcatcaggacgtgatagtgaccgggatcaaggtcaatctcggcgttcacagatcggcccataaagtggctgctatggctgcgcacgagataatcttgttcgccttccttctgcaagcggaacttgagcacgaagctgtacttgccggctagtcctttgaaatagcgcgtatcaagctgaatctgtcagccactacacaggagctggggtaaatggcgcataacgaacctgggataggacaatgactaccggtccagtcttagtcacatccatcatgaatttagtgctgtgataatccgcggaccagggaacattcaaggtagtccattgctgggtaatggtccattcagctccgaagaggcgtgtccgatcgaagtgctggtatttcctgaggagatctttataagagatccagaagaactgggccaggtcagcgtattgagtgaaagtgcgatcgacgaacacctacaccatcattgccaaatttatggccaaggattttcatccactcgggtgtccattctttggatccatcaccccatgcaccgtgccattctttgcgaccccatgggttcctaggtgctatgagcctcttgatcatttcccttttgacattcatgcacatacctcagtcgcagtaaccggtggccgtcaatctcccgggcttccatgatggaataggagtgaccctccgcgataccctttcgatcccttggtggaccccggtaattaggatctaaccagtttgaaaataggcctgtcccacaaccaaacaggaattctgtgttgactttcataatttcctcggtccaaaagcggtccttgttcaggatattgctagataagacctcagacgtaacgcctccggtgagatcctcgatagcctcaccaacaaatccaccctcaatcgcggaatagtctccatgggcctttgcgaaggctttttctagaagaggtagccacgtctcattgtcgtcgacgcactgtgcgaagtacagggcccgcgggcccggctgcccgacccgcccggccnnnnnnnnnnnnnnnnnnnnnnnnnnnnnnnnnnnnnnnnnnnnnnnnnnnnnnnnnnnnnnnnnnnnnnnnnnnnnnnnnnnnnnnnnnnnnnnnctggggaaagacgggggcccgggagcctgtctgccagactcgccggtactcttcctccgtatcaatccgagttatgtcgtcccagatgggtcgctcctccacagactcatcatagtcagcagcgcaaagatatagtttgtcatctataatgcactgctgccactcgccgtctgatgattgaagtcagcatggttcccagtctgattgggctcggagcatacgcttacctcgatggaaaacaaatccataaatcccaacctcttgatcgcgagcaacacaaatcttctcgatgagctcctccttgttgcccatggtgcaaagcgcagccatgagccagcaatccccatcatatccctgccgcacatctgacgcggtaggtccgttaacaaagaaccgcggattttcaaaaatttcctatatgaaagtcttcagcaacctgcaatctgaacactccatggcatatcatttcgaactaacagtcactcttttcacgccccggggtctcatctgcatatttggtttatccaatccatcgagatagtgtctccggccagacttcaggtctagctcgatatcaaagtgtgggtccgaatatctctgattcatgcgctcgcattccttgacaatacggtcgacggacttttgacattcctggcgtgcctgctcgtacgacttgacagcctcgtggccctgaatacggccgctgggaacatgcttggcccgtgtccgtgcatatggattgtccggcagcaccgtatatactttgcccgggtacttggtgttgaattgttcccagaattgcttgatggattcctggggcggttgacagcgtgtacggggcggtcgactgtttgagcgcgaggagcttggtcctgctatggcatagcccatttcgtcgtcgaattccatgtcctgctgtctctgggttgttcttcgcttggttgggggttttcggttttttgggggggaggaagcacagaggtggtaattctcaggcggctatttctctcatatcgcactaatcactccgcaatgacgatcatagatgaaaatagaaacacggattctgttcttgttctaagcgctgggatgacattcccggattttcccctcacgcggccactccgaaccgagaacatcacctcagccttcattccctcgtattgatcagcttattaggcctgatcttcgtaaaagcgttcattataggctgaatgtgcattgtatcagcggacgaacgagcgaatctgacagcaaatggtgctttcggcccccacctcgattctcaggccctcttataacggccacagaaaaaataatgaactggaccagacttggtgatcttcagcgagtagagaagtgagaaatcaaggaatagaggaatagaggaactaaacccggaaaggatgcttagcatgtctcgttccaaagtttcgtggggcaatttttagctgacacgagatgactcttgacctaacccgaggctgaagaagctgaatacaatggtaccgtcacatcatttttcatatctgattacagggtagaaagggtatgtacgcctgttattcaagactaaaacacttcctatgcagtaagcccgccctatcactccccattgaacgccgaaagaggagaaagaaaccatgccccgagaacatttcccacagtgaataagatacactgaaaatgtgtgtaatcatcacactagtggaagccgttacttggaccacgtccagagtagtatgcggtgccgttacggaagtacgggtgtaagcaggcctgcttggccgatagtcggtgtgcagggtcaaactcgagcagagattccaagagctgacatccggcctcttccagcccgggaacaatctcagcgtcagggcgcttccacttggggaatgtggatttataatcggggaacgaggtcacgccgggccagatgtcttcaccgggcgtaccaaggatgctgcaattcgttaatacggttgaacacagaataacagaacaatgcttaccggaaaatcttgaagatctcgtcaatttcagagtcaccggggaagagaggcttgcgtgtacacatctcggcgaaaatggcgcccaccgaccacatatcaacacccgtggagtattgacgtccacccagcagaatctccggagaacggtaccacaatgtgacaacctgtcgattgcgttagtaaacaagcaattccattaatgcaactgaaaattcaatgcatacctcgtgagtgtaagtgcgaaggggaacaccaaacgctctggcaagaccgaaatcggccaacttcagattgccttcacggttaatcaacaagttctggggtttcaagtcacggtgcagaattcggtggctatggcagtatcgaatgccctcaacaagctgggccatgaatttcttgaccattgcgtcgcccaggcctggggttacaccccccttgaatccatcaggcaaaggcttccctcgcccaccgtcactgacaggcagagcctccatgtatttcttaaggtcgcagtcgaggaattcaaagacaaggtagagcttatggccatcggcatggacaatattcagcagctggacgatgttggggtcctgcatctccttgaggagggaaatctcgcgaattgcagtgctggggacgccctcatcttcggcttcgagtcgaatcttcttcagggcaacgatacggttggggtgattgagttcacgggccttgtagaccacaccgtaagtgcctgcagaccattgacgcgtgagttgggctgtaggtaacaaggtcaggtcggaagtacataccttcgccaatcttctcaattttctgataattatccatggtgcccgacattcgatccttcgctgctgttaatgagattaacaattggagaacagaaagaccagaatggggatttgacacaaattggagggatgttgccaagaagaatttgtaggggaagcaaggagaagaggtagctactacttactccgaggatgttggtatctgagaacagctggagcagcacgctcttcaaattccacctggggttcaaaaaagtaatttgttgacgagatgattgacaaaacacagtatttcaatggtggggagagaaagacacaaaacaaacaacccccgcgcccatcatagggcggtgaaacgcgtaccttttccttcgttgttcaactttctctttgacttcatatcttcgcaatggcccaaattaaaggtcttagtgcttatgatcgccctcctgatccagtgagactttgctacaagaaatatactaaaattaccttgtctgaggttgacaatgatccggggatcctcgacctacaagggattgattccgaccaattgcccgacggagtgacaatcgcgcagtatatgtgcagccaggatttgcgattggcatttgatgatttcattcgtggaagccatgctgaaacagaagaggatacttctttgactgaggatattccagtatacgcccataaatcgatttccggttagcattgtatcgcctcgatttagaactgacccagcaggaaaaagagcaatgcctgacctcctgataggcctcctgatgattcccgccatgttccctcctactatccagatcgaactgctctctcgcctattccaccgagacttatccaaccccgagcatcagacaaacctacacctgcactacaatgtcacgtaccccgaaaagtcggaggacacccagatgcccaagtccttcttcgcagacgatcccactcggactttccaacccaaagatcctcagcttcataagcccttgtcggttcaaagtttcttagagaaaaagctgcgctgggtaacattaggtggacaatacgactggaccgccaaattatacccatccggaaccccgccggaatttccgccggacgttgcaaaggtgctacgtgcggccttcccagaaacatcggcccaggctgccattttgaacctctactcccctggagatacactgagcgtgcaccgggacgtgagcgaggagtgtgacgtaggcttgatcagcgtgagtttcggatgcgatgggttgttcttggctagccatgatgacgggaatgggtgtgaggttattcggcttcgctcaggcgatgctgtgtacatgaacggtaaatcgcggttcgcctggcacggagtcccgaagattctgccatcgacctgtccaaaatggctagccgactggccatcctttggagagtctgttccgggaatgccgcctaccccatacgagatgtggaagggctggatgtctagcaaacggatcaacctgaacgttcgacaaatgacgaccactcaggcttccgaagagagagcagatcacgtttgaaagtggaaaattcagatgtcagtaatgtcagattctttccttggtccaaacatggacaatattctatcttaacctactcatgtacagagacagtcatgctgttccaatgagtctggtcaaacatcgcaatccaatgtccgaaagcgttgctaccattcacaagacactttgtctcccgctggagagcaattccacaaggtttttacctgcgggatatcaagcacccacccctttggacgaatcaattgcacccaaatagacattttctgctagaaaccagatcggctcgcttcattttgccagaagagtgccttactaagcatatcaaactttcaaggttcggaattgctcgaggttgctcgatatgcggaagagacctcgggagaccatactgtatctagcgcgtagtgctttatcatgtcagtaacagagaacctgggcatcaattacgatcaagatgaagcattgggctttcgtatgaatgttgaggggaaatgttattctctattaatatagagcagagggagcagagcaagccacctactgttccaagcgaatgcagagtacaaagaataacccccaggcgccttgtccgatgcttttctacaaatattatattccacgaccagtcagttcctggatgacgatgacggaggcgtctgtccagagggtgcagcaagattggataaatgaggcgtggaagatccccaagttttaccacctgaagaaggcggagcatgaccagactcggacgaaggaccagacgggtcttccgagccattcatgaggcgctgtcgcttcgccgcaggcagcccacctacctggggcatgccgctaggtagagcgccgttagacgggctgcgaggatctgcaaaagagtggggtgaagcgtagtgggtagatgaagcaggggtggaggcacccgcgacgtctgggctcaaagctgtggcagattgcaaggggcgcaagcgattcggatgagaggtggtgtcctcgcctgggcgtggaggccggacatcagggcttttctgagactgactttggtctggatcccctagctgactagggtttccgtaaccaaccccaatccggcccatgcccttatcgtgcataacaacacgtctccatttggcaaccacgctgtcgtagtcccatcgtgtcgaatcgggactgatgtggctctcttttgcgtctaattcccgtgctacctctcgtggtagggggagcgtatctggggggaacagtgcgaactcacgaggccactggcatgatccgaggcgctcgacctgcgcacgcaactgatttgcttcctgttgcactcgagcgagttgctcgtccgaggacttgcgcttctctgcctcccgtgcaaatgcacgcgtgatctccaattgccacgcatcgcgccgggtctcgtgggacagggaactccaatgattgaaggccaattctaagtgtcggaaactgatatcctcgtgctgttgtgcactccggtatatcatgttcggatccaccccgctattcccatgtcttgtgtaaggcgcagaagtggaggagtctgctgcgagttggtcggtctgccattgtgcaaccttggaacgaagggcttggcggattatatcgaggtgctcggctccggggggctgaaggggaaacgaggtagaggagggaaacggatgcgtcgcaaacaggcttggtgggggagggagcagctggagacacatggagggaaaagtctgagcttgaatgtcgaagtcgaacggagatagccggggccggatacgagagctaatgtttcgtgagcttgggggttagatacaaaatgatggaaatgagtcgacatacgtcgcagctttgatattatcaagcacctcgcgcagtgcgagctccagcgcccgcatcgtatccgggttgctggagctagcacctctactcgcatagtccggaagctgtaaagaccctgtgtgagactgcgatggcgtcattcgaggcccatccggtacgcgactagggttggggatatcgttgatcacccccgtcgcatgccaggtaggtgtgttgaacatcatgcgcaccggagcttcgcgcgacttcgatcccgagtccccagctgtaaatggctctgaggttccctttttctggcttcgttcagggctgccctcgttcttccctgttgatgttcgtgcctggcgccgggtgattccgctgcgaattcgtctgatctcttcgacgtcgtggattccgtcaggtttcttcttaaaaaggaattggtcgaggtgtcgacctaatgatgaagaggtaaatgcttgttggcagtactggcatttgcgatcctttgcagcaagactggccttcgactcgtcaccagcggtcgagccgtcgggggtttctctggagggttctatttcttccttcatggtcggggacgtagaaagatgagatgaatgaaatagatagtaagcttttcagcttataatgtcatgacatatgatatagtgcgaccagaagcagcaagctggtgtagggaaaattcaacgtggatgagagggaggtgagaaagatgaacaggaaaatgccaagcttttgggcgcggagctgcgcgagcaatttttgtgggccaaggcacatggagatttatctatgtcggacttattgatctactgatgaattgcatgtatatatcgtgtgaaaccacttcaatgctacctatgcaagtattgagatagtctctgcaatgtaactaggcccctcgaccaatagatcaagcagaatcaatgtgactgcctgggtgcatattgtacttcgaacaaatcagaatcaagaactgcaattgttatatatttgtcatgaccatagaaacttccctctaccttatcaagacacggacatcatgttggatcaatgacacacgcggatagggggaagtacaacactaagcctggagagtctagcacacgatgcactcatgcgcagcatggaagacacggtggaaccatgttcaaggacgagctttgctctttctcgtcttacgcgcactgagccagcgtttcacgtcgctgataccgtgcaaatacaaccaggagaagatgaaaacaacagcaaagttgaagataatgaatccccagatgatcccctaatggatgttagattaatctggcactctgaaggttagttaaaggggtatagatcacgatactcacataatctctccatttgtgcgagtaaaaaacattgaggctactagcctgaaaaatgtaacaaagttctagttagctatgctccaagtctgctggtcaagacattcagaagcgaaacttacaaaattatcaccgactgagtattgacagaatgagcacattccattcccaatgtctcggacatatccaccggatttttcggcataagacccagcatattcttggcagttcatgccaggtggagtgctaaagcgggattcttcgcgctcaatacaccgcacggggacattatgggtgatggctccaacaaatccctcaagcagatagtggaaaggcgtaagccagtacatccacgcttgccaaaaatgcggtattgcgacataagggacgacaacgccgcagaaggaagcaacaaaggtaaagaaagttggcacgagcaaacttgcaaatagcacatttggtgcaattgcagctatgaattgaccaaggccgatataatatagttcaaaaagcatcatcgacatccaaacgtagccggaggtaaacgagtcgcgcgggaaccaagttccccagtaccttttatatttctgtcagaggggagagatgaaatgccttctcaatagacacttaccagcagttgaagtaaatggacccggcaacaaccgagtatggcagttctgggatgattgtgctcgtcacaaaggcagcccaagagtagatctttgagttagcctctcgagattcataaaggcctcgaaaatgaatatatcgtggttggagttgctgtatcagcggtggggctatcgtcaaggtcatgaaaacagagaaaagtcgtgattgcatgtcgataaagctatttcccaaatgccagaatgtgaaggtgttgaaaaggccggtaaagatgtggagcatgaatttaccctagttggcaattaggcaagtcattcgggcttgttttttgagacctagtgacttacaaggatgtagtctgggatcctccagtaagccacgaatgcgcgcttagtgactgcgactgtttgaacatagagaggcatcgcgtattcgcgatcgtcgtcaaccttctggtcattttgagcgttgcgacgagaggcgattataccttcaaggtccccagaaagctgtttggattctggcgagttggcccatacattaccccagtcctgtcccttataatcgggatttccggctccaatgacttccaacatatactagatcgaatatcagtgagaaccaatacatccagctttataatacacacctctgccggattttcatgtggtgagcaattcctcccgccgttttgttcaaagtaatcaatcagcgtcttggagtcgtttccaaggggcccattataaacaacaattccaccgcttttcagtagcaagagctcatcgaagttctcgaataagacagcagaaggttgatgtattgtgcagagaatggcctgaccggcatctgcgagtcggcgaaggaagcgtacaatgttgaacgcggccagagaatcgaggcctgacgtgggttcatctaggaatagcaaaagctctggtttacttgctagttcaactgcaattgtgagtcgtttgcgctgctcttggttgaggcctgagcccatggatccaacaattgccccggcgatggaacgcatttctaataagtcaatgattgtctcacaataatcatacttttcttttaatgggacttctttcggctgccgcaacagagcggagaaccgaagagactcccgcacagtagcagtgggttcgtgaatgtccatctgctcggcgaatcccgtggctctctgaaagctccttgggagaggcctgaaaatattaatattcattctcaatgaaatactcaaagatatcctacctcccatcaactaagaagttgccggtgaccacgccaaaattgatgcgctgtgctagcgcattgagcaaggtggttttgctagtcagacattagcatcaagaatgaagtcaaccttgttacgtgcttaccccgagccagaagcacccatcaatgcagtcagccgaccaggcttgacataccctttaacattttgcaaaagttgtctctgtccacccttgtatggaatggtgtagtcaacgtcttgccatgtaaagattgccgtgtttgtagcaatatcccggactttttcatgaggtacactcgtgtcgccgttgttttcgttggatgctgcgccatccgcctctgtggattcctcatcttttcgggggccggattgcttgatgacatcttgaactgcttggggggcttcacttcttttgaacaccgtgaccgagctgccgcccttattaggtctctgtaattccattcccaacattgtcaagcagacgaaaaagataagccatcctgtaatgatgccgaaattccgccacaggtgagccctggagtaagtgtacgccgtttggatatacttgggaccatgaacgatcaactggtctatatcactgccttgtattgcacatgactggtgaccaggcacagcatttggcccatcaggcacaatgtagggcgtttcacatttgatctggagattgtggaactcgttggccatcaatgcctcgaatgcgtattggacagggttgatccaaatgagccactttaaccatgggtgcattttccacggtgggatgagatagcctgaattttgttggccattaaactcgaatattaggttccattctgctgggctcacctgtgtacacaaccaatgcctgtatggcgacaccagtgaggcgggtggctatatagtgttattgaagacttcttgattccgagaggtttgttccactcaccaacatccaatgaggcacatagagcccccagggcacgaaagaaggagtacatagtcattgtgagaatgaaaatgaaaagcagatttataaagaactgtgagggtgttcgagcaagatttgccatgctaaatccatcatcagtttgatccacgtaaagaatccaatgagactcacaagtatactatgatatcaaatagaacgacttgtatgaacacgagaggcacatcaaccacaacctgggcaagcgcatatgctgctggccggtagaaagagctagaaaagattagtcccatcattttgtctttttttttatagtcctcacaagcttttgtgtttcatcaaaattggtcggctcccaaatgctgctgtcagctctgccatagcaagcaatgaattgaaaagcagtataaggaacatcacaccacccctagtaaaaacgccagaacttgaaacggtgagccatatggagtctcttcgcatttggagaggcaattgcttaccttgtatcgggaaggttgtaaaatagactaccaataatgagagcttgaaaggttatcatactccactttccaatcaacgaatctctatcaccaatcattaccagaaattgacgatgtgtgagaatcataacttgtttgtagaatgagatggtgaagttttttcgtttggcctcacttcttgcagcctctctctcctgcctttggctttcgatatcgccctcaaagcttttcatatccgctaggttgctttggtaagtatcacttttgcgatatgcagcttgaaattcagctgcattccgaggaattcggtcgtcccagccatctttgacacgccgcgcataggggtcattgacagaagtcaaaaagtcgggagttgtccaacgcggggggcattcaaagcccagtccttcgaaataggcctttgcgtcctgggtagggccgaagaaagagcattttccctcttcgattaagatcaccttgtcaaaaaggtcaaataaattctccgatgcctggtagagagctactatcgttgaaacgttggcggtatttgttagacttcgcaagctttgaacatactctagcgctgtactggcgtccaaacccttggtagagttgtcccagcactgggtactagcctttgtaaccatagcttccgcaattgaggttcgtttcttctcacccccagaaactccacgaatgagttcgttcccaactttggttcccagagcatgttcaatccagaacaacttagctatggcggtcaagaatgtctgctggtattcctttcggctttctcctggtattcttgaggctttgtcgggggttcgagctttcaaggcaaaaagcagtgtatctcgcacagtcaaagttgcataatggagatcatcctcagggttgtacaagactgatagttttagttcggaatcatggtcacacagacaaggacacaccttctgacctatactcctttgccattttttcagagtctgtgccgccataccgcacatcgccttcaatgctttcgtagcccgctcgttgattgccaagcattttcaagaaagtggaacagccagagccagggcggcccagaacaagaagcatctcccccggacgaacacaacccttgatatgagatcagtcgggcatatctctaggggtgagaaatatactcacattgaaatcatctaagatagttcgtatcgctgcttttttggccccggcaccttttctgccccgagtgagtagttgcttgatgagccgtggtaagccgagaaaaatatccccgttggtgggttgtagagcagctccgaggccgacaccttttacagtgaggttcttccatagaactccaacatgacgtgttttctcttcttcggaatttgctttgcgctcagggccgaacatccgtgagatcagtctttctatctgggcccattcctctccctgaggatcatgaccggaggctttgtgtcgagatttagtacgtgcgaggccatcgtcagttttctttggcgccgtggaatctgcctgggtgtctgatgaggcagtgcgggttggcgtgtaagcttcggatggagacgaactggctcgcgaagatgaaccctcagaggaagaaacggaattttcaggaatgtgttctgggtttgtagatgatgcggactcgctttccatagaatggtcgtttgccatggtcgttttttgagactgagcccaggccttttgaggtatgcgattatgagacaacgtgatatcggatgactatatatgtagctgagcgcaacacgtcggttagcgacgataagtataaacagaatcactccgcatggatatcatgaatgtcaagaaaatggaaaggggtgtaggtattacgtcaagtatcattgcgaaaagggaactcggggtgtcggaacaggaacgaaccgcaatattatccagagcgtctcttatttgcttgattttgtagactgtaaacgagtacatgtgtcatgtgtagtgaggtcatcgcgtccggttctattatatcgtgcgattctttctttctgagcctaccaaccataaacttactaaatgtgaacaattaatttcaaacattttctactaagttctaggaggtcgtatcgacgtacgatgcatttaaatcccccgcagtttgagttgtctccgatcatgaagtcatcgatcgtacaatatggacatggatgtcatggagtcatcttgaatgccattagttctgcgcttttgatccttattctttggctgctggttttaattagtgtattttctcatatctaataaatataatcgccctggttgtttcccactgaacaagcttcgccgatttgtattcattactttttttgggggttaccattgctcttgtcctaagtatctcaaatccatattgttcatgtagttctaaatagattgcattaagaagaagagttgatggggcctaatgcctaggcaatcatatctaggcgtgtcagtatcagctgctttcgacccacgaaggttgaccgcttcgattctttgattctcaggctgatctttcaaattatatagcttttattttggaatgaagcacctcgtgcccggaaacataatgagcagtgctgtcagcattaccttcctacctatctaggaatataaacatctacggaattgattaccgacaacatttaccaactcgttttactacagcacaagagaaccctatttgtgttagtctaccaaacaggtgtgacgagagtaactctacaatcatgatctcgtcattctaggacaggttagtcaagcatatcagacaaatcttgactgcatttatcaatgcaaaagctagatagagcagcacgccatgattacagcatattactctccggttcagtagtgataaatctctagattccactctaggagcagggaagatgtatctctcaccctagaaaccattccggcttcttctgcggtgttcttgtgcagctttggtagcaatgaagccccatcgcgctcacagatttctccgaaaggtgttggactttttccatttatccactccctcatcaaagggtgcagtcaaagcccgcagcaagtatgtctccagccttttcgtggtattgcttgccaaaaattaatggcaggttcagtgctaagctgtggtgtgttgctaccaccacacctcctcttcacagcatctccgctagccgaggatgtgaccagactgaagtgaatggtcaagttgatgatcctcctcaatattccttcgacggcgcagttcttgaaaagccaatctcgactcgcagccaactggagggtcgaattgtgaaactctggaagaaagtctggctaggcctttatcagatcgatgataacgaggatcgataccatgtcgaacgactggaagcactttctctcggggccggcttgactcgcacataccgagttggcgagcttcaagttctcaggcgtcattttcttcgaagcgagaccaacaatggaattgcttcgttgaagcttttccggggtctatcactttcgacccttctatccgtgatccatattctggaggcttatgaaagtgaaattgagaacttgaggctgctctattccatcttgcgaaggggtcagctttcactgcatgagactgctgatcttgctcaaactgctgttgtcagaactgagtatatggcaattgcggagccgatggagaagcggatcagacagtatgatattcgaatgaatgtggtaaatatggatatctgcgatgaggcaatgggtttctatgagcgacaaaagggggaatatatttaccacaaggcattcccgaatgcgtggtaaatacggggagtttttggttccatcctgtcccgtttcacattgactaaactagtattggaggactttgagtacaatcagtataatttggatcaaatattaatgttataacttcaaggacgtttgaataaaaattatactccgtactcatgatgttattagacatggtattcacaagttgtcttaaattcgaggggcccccctttttttggctaatgcgaccctggactcagcttaccgccagccacaccgccctggtgtcgaactccctagcaagacagaattaaattgatgccttatatgtaaggtttgatatggcagaatctggcagaggggggtcccattaaaccaaaggggggggtcgaattagcaattagggtccttataacagtcccaaaattcttatagtacatacttccaaccttcttgcaaatatctcctcggggccccttgatccctcaaatgccgcattatagagaacaagttgcaattgcagcctgaaacctgggtgtgcacaggtgctatactaatccaggtacctacagggcttgagaatcaattcaatccatcttccacatcaccttcagttgtttaatagcatccccgtacatcctttcacgcacctgattccccttccagaaagagggctttttatcaaatccgtgaacagcatcctcaatcacaaacccgcctatactcgccatcttcccgtcttcaacgaacccaccaagtctttcccggaacgtatttccttcaacaagcaattgatcccacccacaagtatagattgccacagcaggcggatacgccgcatgcaacagagatgcaggtgccagaccaggcgaaagataaggatgcgacatatccacccggcccgtccccggccgtatcggtaaacccgcagcgagaagataggaatcgtcgaagaacttgaataaagaaggagaaatcatggatttttgtggggcgataggatttgtagcgtcacgctctttccgcgttcgtgtccagtcggtgccggcgtagaatactaccaaaccagccaacgctacctccccgcgtatcgacgcccagcgctttttctgtagttcatcgtgcagtctgaatggcattgctagagcgaggttcccgcctgcgctggctccgctgagcacgaagcgcgttttgtcaagattgtacttctttgcttcttgccatagccatagtatagcaccgacgccgtcctctaatgcgacggggaagggttgctccggggctagacggtaattaacgcttattaccacagcatctgggtaggcatttaccacggtaccggcccagcgggcatcatcacgagcatggccgatggagaagcctccgccgtggaagttgatgaggacgggacggggtgggcatggcttggtttgcttgcgaggatagagggggtttgagggtgcggtgaagaagtagagttggattgatcccggggctttgctgactgtggacggaatagcaattccgacgcttggtcctgggggaagtggccacgaaaggtatcggtctagtatggagagtaggtgggcgagcatgcgatatcggtgtgccttgttcctaagggcggagcgggacggggagggtgatatggatgccatattgtactgcaatgaaatgtttttgtacaaacgggcgaacaattgatgatagttatgtggtgttatatagatgaatgatgtaacttgttagtcactggacctgaatgatgcctgtcagatgttagtcaacatatcaaggaggatcttgtgtattatacgatttgagcgttgatattagaagcgaactgttgcagtaaagtgctaatattctaatggtggttgaggctgttttgtctccattcccgagtcgcatatagtaggtcggactccaagcttccagataaagagaagaatgcctggtcgtttataggtttcttaattcgaatttctatcccattagaaaagagatacggatcaatttacccattcttcacatctccaaattttctggtctgtgccctagacgccgggatcggcaagccgagcccgaatttgaaggtttgcacggagtactccggagagcatatgttgtacattatttcgacgtagttcgcgttatctcagagcagactacggagcagttaacctatttcatcggaaacctctccgaagcgtaatcggaaattccccacctcctcgtaggccgggatccctatcccccacgtcaacgacgtcggcacgaaagactacagccagcctgtgcatcatctccggtcgatatttgacttggaggatatagggcacgagaattctgctaaggtgctgaggggacactgtattcaagtcaacccttgtgttttaaactcggtatatccaacatttcagcgaattttctgttccttcaattttgagaccgggggggggggggggaatccgcagctcgacatcctacaaagcgtatcttgtactgggaatccaacgttcttaccagcgcgtttcgacagtgttgaaccatggatagtcagatgcattcgagttcggttgaaattaaatcgagatgggacaacaagtactgcagatatatatttcaccttagatggtctctcaccttgccaaacacaaagtacaacatatatagcgatggacgcaaacgtaggtgcgctggagtgaatcttggtattacacgaatggatctcctgcaactcggagagataacaatagctaaaatagtgtatacaatgcctgcctcgatcaccaacaccccatttgcaccttcccccacggtcatttgtcattgttttttttttcttttctccggatagctttgtaagactactcctcattcgatcaataccatgggtagaaaagatgcgtatgcatgtcaggtttgagatactataggctactcggagacggaccaacggaataaagagtacatcagcatataccggagccaacggtctcatctaccaaacatccaacctgttcttccacttgaccccttataagatggtatcctagtacagcgtttgaatgcacagtgtctacccaatcatgcatatagtgatatttactttcctaattcactatcatcggcatcaattgccaacgctggtggcgactttgaaaaatgcactaggacgtggcatctgttagtccacagtcaacgtagttacatcatttgatggcaatcgccgagtgaggtcacggcctaatcatctgcacctctaactggtagctcattaaactataccccgcatccgcagttcgagctaggacgagaccacgcgacaatttccccagataaaaagccaagacgccaagaagtgcatcgccagcgagatgtggaaattttagagcgatactgcccaatgccacaggtcatgggagcaggaagactcgggcgtataattttgcatgtttatcttatattgtacaacaacacgggtgaatttatttttgcagtactccgtacgatgaagtactccgtaataatctcaataatgacgtgcagccgctggagtcaatctcggggaaaataggaggacaaatcgatctttgtcccccttcaactcggcccaggccgttttcaaaccgtcggcgctggttgggcagatattttagataggtagactcgaatgaaagacaagaaccgtatcactacgggtaatttaggaagctaagtttcagaaatgattggctgtgattgatataaaggaccgagaatctactaattaccttagtgactgttgatccgggtaacggacataaagaagaaaatgcgacgggtgtggacgaaaaggggcaaagggcaattcccggaatgtgtgaatagattcaataattgaagatcacggggcaagcttagctttcaccatggctatactccgtacatattccgttttgcggaggattacagggggaaccccctttctccaccagcccttactccttcagggcgtgaacaaaaaagccgcagaacaaaaaaagcctcaaattcgatacatagttccagccagctggtattcgtgtcacacgcaaggcaggaaaaatgaaaatgatcagcagagttaaaaaaagcgaagacacttagtacgtaagtgaaacaaatcgcgcaaaaaaataactaattgtttcacaaagaatgggctccgggtagaatttgacaaaaaagaaaaagaaaaagctcgcgttcccgacgccgtagccggttcgggatccgccactaacggggagaaggatctggggttgtatcgcagaaatgcacatcccgaggcgacggcgacggtggccgataaaaacccatacattcatagcagaccgctcatgtgcgatattaattaggaatcattcttcataggctgtggtccaggccatcgccttcggcgttggaacgtaatatgcatggggttctgcctttggggcttggatctggagtaactgctcggagcctggctttgatctcattgcaccactataacgagcgattatcgtcgcccagcgaaaaccagtgaaaatagggctaggacccagcggcaatatcttctacccacccgatcatcctaggaggtagaaatataagcgctctgattggtccccaccgccgcgatcaatggatgcatgtggcatcatcctcggctggttaaacgccgttatttgctgctgagtcctgctcccagacaatcgttccgagtttgtagccgagcctattgccatccgggggtgacagggtgagtttcattttgttttcctttccacgggcaacacattccgatatcaattcgggttgatgcgagccgaaaacagaagagatgggggatcgtgaagggttaaggttgatcgacgagattatgtcagctccccgcgattctgagtgggctagactaggaaattcttagacgtatatcgattgggtgaagtcattatgcgtcattcctgtcgtccgtggctgaagaattcctagatttggagaggcacttttggtaaactcttttttacgaggttttaggaactaatgctcagatgattgacgaaatgcaaagttcgcccacgtagactggggtgtttgccgcaagcgtcagagcagcataaaagggcccctaaactggtctcatgcacctctccttgtaaactactcaggaaaaaaaaatccattgagttatttttgattctagaacttctatctggttcccactagtattcgccttcccggtcatagatccccttgttccgaatcaagttcgtgctcatttgaataactcgggtcaagtcggactgcgcctccaggtctttgcaacccacggcagcacttcatccccatccatcaagcgtgttcctcagctcggcgttcagccccgacatcacccgtggaactgtggagaaacactacggaaagtgcacgagaaccctccttcataccaagaccgatcgtgaccatggcctctctcggaaaggattatatacccctcgaccgctccaattctcctggtcctctggcatcagatttctctcaacaacaagtcgctaaacaacgcaacaataactaccactctacttcactcagaaatatggttgccacatctgtgaatcgcactgccttgcaccccggcggtgttcagtatgttaccttcctatctcactgtccatacctcatcgtcgctaactgtcttcacttaggcctagcaagggtcacaccgagcttgaggaggagcttcacgagactgctcacattgactacgaccgtgtctccattgtaagacctcaccacccttgcgctagacatttgattacaatgtccatgccgtctatcttgcttcatctactaacatcatttagattgctaacccctctgttcctgccctttacgaagatgctcttgtctacgagactggtactgctgttacctccagcggtgctttgagcgcatactccggtgctaagactggtcgttccccctccgacaagcgtgtcgtccaggaggcttcctcagaaagcgatatctggtggggacccgtaaataagcccatgacactggatgtgagtaaactttttgattcttgatgcgtgattacactggatatgtcattgtcctcattggagcacacccttgcagatgggcccgaggagatccacttggatcccttgcatatgcaccgggaggtcaagcttttcggcaagactctgtgcaaccttttgggttgcggtctctgccggataatccctcattgcctttccatcatcatcccagggaatatttccttcccccagtttcattgcccattacttgcccccctcgatttgcccctcggctttcatttgcggctccgcaatccccgcccttggcccgatgacatcacgtgaatgacgtcaacaataagaatggtgactaatagattccccacaggtctggcgtatcaaccgtgagcgtgctgtcgactacctgaacacccgtaaccgcatctatgttatcgatggttacgccggctgggacaaacgctaccagatcagcgttcgcgttgtctgcgctcgcgcctaccacgctctcttcatgcgcaacatgctgattcgccccagccgcgaggagctcgagcacttccaccccgactatgttatctacaatgctggctctttccctgccaaccgcttcactgagggtatgacctctgccacatccgtggccatcaactttgccgataaggagatggttatccttggtaccgagtacgctggtgagatgaagaagggtgtcttcaccgttctctactacgagatgcccgtcaagcacaacgtccttactcttcactcctctgccaaccagggtccggatggtgatgttaccgtcttcttcggtctgtctggtactggcaagaccaccttgtccgctgatactaagcgccagctgatcggtgacgacgagcactgctggactgacaccggtgtcttcaacattgagggtggttgctacgccaagtgcattggtctctccgccgagaaggagcccgatattttcaacgccatccgcttcggctccgttcttgagaacaccgttttcgaccccgtctcccgcgttgttgactacgatgatgccacccttaccgagaacacccgttgcgcctaccctattgagtacatcgacaacgccaagattccctgtgtcagcgacaaccaccccagcaacatcattctgctcacctgtgatgcccgcggtgtcctgcctcccatttccaagctcaccccggagcagaccatgttccacttcatctccggttacacctccaagatggctggtactgaggatggtgtcactgagccccaggctaccttctcttcttgcttcgctcagcccttcttggctcttcaccccatgcgctacgctcacatgttggccgagaagattaagcagcacaaggttaacgcctggctcctgaacaccggttgggttggcgctggcgccaccactggcggcaagcgttgccctctcaagtacactcgtgccattctggattccatccacagcggcgagctggccaaggctgagtacgagaactacgctaccttcaacctgcccgtgcctacttcctgcgccggtgtccccagcgagctccttaaccctgagaagagctggaccgcctccacttccttcaaggatgaggtcaccaaacttgctgtcctcttcaacgagaacttccagaagtactctgatgaggccacccccgatgtcctcgccgccgcccctcaagtttagagggttggagcgatggttaagaatttctttttctccttgtttcttgttcttccaaacaggatgaataagtcatttgcatggcgtgctgctttattttgatgatgctctttggtcgccgacgtctgccgcttgtatcgggacaagcggatggatctttattgatttccccccgatttgggttgtgctttttattattttttgccatctatctttgactggctgggagttatgtagtgatattaatgaaacaatttattacatcatagtcaccgcaatggatcatacctcatttctaaacttattctcaactaatatgtttttgtattccaatggctgcttcttgtagcatccatggtggtattgtttgatgatccctggttgacagtgcgctgccattaaaccctcgtcaacgacgccttggatctatttgcacctacctggttatttcggtcagccatttcatgattttacgatgttcggttagacgcgttcgcaaggcggacttaacaaatatagtcagttgggtgatatcatcggaaaattactacagtttgagtcttccgctaaggcatttggggaggatatattgaatgacttttggctcaagcatagaaagtgaggtcatcgccttcttcactagtagactccagctggacctaggaacctcgtcttatgtacggttggcctaacccaaagaccaatagtcctttctgaattctgaactctgaacgatagaatgtttgatttgatgtatttctctatgaatgcttatcttgcttgccgcgaagctatcgacagcgcaagtgacttttgggcgaaatcatccctatcctttggtagacggggttagcatgcgaagccccgtattgatgatggatacaactcaggtgaaacggcgaaggcatggaaaagccaacattccgacgggatgcattagccgtcatgatgctagctgatgaaaaagtggagtagggtggttgaggctcgtcgatgcagttaggatcacggtacattgggtcttttcggattgtacggtattcgatgtggtggtccttggcccacgaggactttttctttgaatactctagagaaataagagcagagtcagctttaagaaaagacctaggttgtaccaagactgaaggtacctttctagattgaacgcaaaatgcaatgtaggtgataacgggtatgagaggtatgcttttgaagaaagaagagacggggagctgagtcaacaccaacattcgaaaaactgtttgtcgctatgcatatcttgcccgcccaaacagaccatcgttgggggtaaaagaagtagttgtgaatccaaacgggcttgtagtatttaaggtattctcaggtttggcaacttttttttgcgctcgactttcggcgtctttccgttgatattccctgttgatggcatccttggaggaaaggagttgagagagtgtcgaagctaggtcactcataaagtccccagtgtcttcttggaagtcggcaaaatcgttcctaaatttctcatgggacgcggcaataaaatcgcataaatctttgcgagcaagatcgctcgataggagcgtgctgccgtagataatccgaatcgtatctgccagagaaccactcgttgcgtagggcgaactcccatactctttcagaaaaggtccaaaagcatccttcattaggacacgagcataatcttgtaggtccataacaagataacgctgggcgaatgagtagaccttcgcgtgtagaactatagcatcccccgtatagcttcgagaagtcggtgaggagctggatgtagcatctaaaagcacttaataggttaatagtagagttattgcagatcaggtagactcactgtgttcagtagatgattttgttggttcttgtagtactgattttttcttgcttggatgcagttcccatggggtagtatatttctgggaatagcaaaattccagaacacaactgatagtttcttcatcgaaatcggaccagtccaataagtcttgtccggcaaacttccatggtccagtcaccctagcggttaaggcagatttgccttggatcagagcaccggggtggacatagaaagtggttttgcgttcccctacagcagcctttaacgggctttccatgtaaatgcttttcggccattagcacttgaacgaggaaaagaaagaaatgggtttcgtccagtacctatggaccggtgtctcttcgactgagctcatgatggatgggatgtagagttgcaacaaagacagaggacttgagatggccggtgtcagaatgaataggaaggaggggagggggagaatgtcatgagaaatgaagtttaaatgaaaatcaggcttgagtgggaagactccgcagcaaactcgtgatgagcccaataatacgaccgcaaggaatgatagaaatattacgattggtctcacaactatatcatctttcgatgccccccaacacgccttgtcttcagcccagctccagaaaccagttctgactttgtctgtcgctgctgcgcatttcctaaaagagcttggattaccggtctggtgatgtcaataccatcagattctcactaataatctatcacgtaagaattacatgaaaggatagcgctcatagaagttagcaaggtcaattcttagtatggtcaggagtgtaaaaggaagctatacgccgtgaaagacagcttgttggctctatttatatgcattgaaggctatatcgcctacactcaaacccgactaagcccgatccgtgcttgttaactttgtaaatcgcgtacaatttcatatgggtttagttggtgtaaatcttgtagtaagactcgctaaggctctctttgatttttatcttttctataactaagcaagtgaatctagcaaagtaatacaactcgtaaatgtttacagcctaagtaggtacatactgactacaagtaggtaccaatcaagagtgatgcaaatcaaacggaaggaatcaagcagatgtgatcgcgggccccgaagctcagaaagatcttgcgtgtggcaattgctaccaaggcgagagaaagaaaggtatccctaatattgagatatcaaggcactcgtccaccactaaagaagaaacgattctgctgtttactcggcagctggtagtaacatcttctccactcagcaaggtaaccgtctttcttctcacatgtcttttgcaggtcagccttggaggactgaaggagagtaagctgagccaaaagttcgcaagctagttcagtcataaagtcctcagtttgtttttgaaattggggaaggtaatgagcgaactcctcgtgtgatgaggcaataaagctgcgaagcgcaatgcgagcagcatcaatgttagtatctgacgagagcgtgcagctatagatgatccgaaccgcctccactagagagagacttgttgcttggggtgaagagctgtattcttctagacaaggcttgaagcagtccttcatctgagtcagggcaaaactttgtagctcatcgatgagataatgctgggcgaatgagtagaccttagcatgtagcactatagcatcccctgtgtagcttcgggtggcaagtggggaaccagactcagtatctaggtgaaaagaagcactaagtaagctgagctcctgggccttcaaactctaatcaacttaccttcctgagcgtctagttcagtcaacactagctctggctctggattccccgtgttcatagccgactgccgtgggacatcgtattgccggccatgaaagaatctcagaacgcaatcaatggtttcttcatcaaaataagaccagtccaatgtttcctctccggcgttcttccatggcccagtcaccctggcagtcaaggcagatttgccctgtatcaaagcaccgggctggaaatggaaaatggttttgtttttgccaacaacggccttgattgggtcttgcatgaatatacttttcacttatcagtaatagaatagcagtggaaatgagatatggcggtacctttcaaacttggttccttctaccgagcctatgatgaatgccactcggattttcttcagttagatatgcttgtggttgacagagaaagccaggggaacgaagagggtccttgtagataataaggaagaggaggcgctaatggaaccatgatagaaagatgaccgtgacaaccacatggcaaatatatatcaactatacgattgatgcacccatggaacctgacaaaatgatgatgtttggatgcatggctgctataatgcgcgtcctttgtcaggtcagtttcacgttagtttgaccttgctttgtgtatgatcctcgcccccaactagataagtgaccaaagacacctgaaagattcaaataaaaaggaactggataaagatgccaaagggtcagaggtcaggggtcaaagagaggtacgtagaacttgtgaatagaaaaagaaaacctcaatcccgctcctacaactaggcccgggctcctcaattcgatatccgtccagaaaagccgtacgaggaacgttcccgaactcctatgccggtaggccgtgggtccaaatataggcttgaggctagtggggttcccgacgtgccgagaaccctttccacggaatgaattgggagtgatgatgcgcttttagggtcgagctaggcacggagtggattccgcggaagacacacctacatttctagaatcggaagggttagaataatagcgctggtcgacgttgtttacaaggaagtgacggagtttgttgtgtatggcggtttccgagactgtgatttcttttttgtcgtagaataatgcagatagctgaatatgttcattgacatggagaggtccgtggctaagcgcatgaattgtttggcggcatttcatctccgttgtcaggacttaatttaaaccggacctcggactctgagagatgcaacgattgaaacatggggcgggtcgtaggtcgtacattattaccgaatgatgagatccgatactaggtgtcttttgcgcactcacggttagcttagtctcccttcgcttcgcgaacctttcaaccctgccaattcgaatagaaaaaaagcgccgtctattttccgtgccatattgccatattgagaacgagtatccatgcgtgtgcattgttcgggaaacagacctccgctgactctgaccgacttgctcggtccttttgaaacgacgttgaaagttgacgacttatatccgtaatcgtcacaaaggaccaataccatgaagcagatgcaacacagagacggtgtgagaatccaccccagaagcttactgtcatatttattgccggtaatcggcggaaaagagccagagacaggtcaaaccggaggaatctgtgatgactggctctgtcaacgcgacaataagtagcgggagccgcaggtccacacagggaaaagggggatcatttaggatctcaatggatgagattggtcggcggccaggggcaggttgcaaggacggggcccaccacagcgtcagcgaaatgatggtcggccgattggactgccgaacatagtcggatcatggcccgagggtagcggcaaaaaattaatgaggtggaatagccggtcagattggattctagacactgggactttgccagggccctcgataataaaaaccgagtccgatatacggctaatccgtgcgtattgagtccaatgttcgtagagttgatcccgggagattgtactgggaataacgtgcggcctgcgtttttgaacagggtatataccggacattagcagaatgtgtaggtataagtaattcgatccccgagatatgcccggagaggttgtctaagcggtgtcgggtctatctgtatggacgggatcccgataagttctcgtggggaatccaaaagcggcttagcgttggtggggattccggatttagctcgtactcgtactaatatatatctgcctcgttgatgtggttgtagggcttcgagggggatgaatggaatattgacagtctgttctatgttgggacaatattggacacggctctggaatattttatacctcccttcacatagatataggtagtagatggcacgtttggcgaattcaggatcgtccatcgaccccccgcattttgacaagctccatagcatgtccacattcgtgcatggttaatcgaaatcatgtagatatcattggtccaacacgcaaatccttgtgtggagaggcctggttctggcgactttcgctccatacggtccaacaaatgccagactttatttccgtctattgtctctcatcccatacatcctgagcggggaatccgcggatagccatcggttgagcgtcggttgaggggtcggttgaagggcaataacctccggttcggaacgagtttgcggctgtgtagattgacttggacatttgagcatattagaacaagcgcaggcccccattgtcccggtttgaccttgtatagttgtaccagagtactcgactctacacgacataaccaccccgcaccttctctgtcttgtgacttttcttgtgtctcccctcatattctcccttggcctctgttctctgttctttgctttcaaatattgaccctgtcgacacctcctgtcctgaatctcatataaaagcaacactacgtcatcggtaagtaccatggtccaagatcgtggacagtccccgtggcttccaaatccaccaaagaggatcctgctagtctcctgcaaagggcatctcccgtgcttcttgacattctcctatacatcgtgcattgtattgacctgcatctacagtaggacctgaatacttcactatggcatccactctcaaggatagggccgccaaccatgctgctgcttctgcggaaaatggcactgagcccgaagctcctcccgacctcctgcaccagccgtacgtccgcgccgtcctgcccttcatcaacggcggactgtccggtatgaccgccaccgccgtgattcagcccgtcgatatggtcaaagtgcgcctgcagctcgctggcgaaggagcccgcactggtcctcgcccatccgccctcggcatcactcgcgaaatcattgcctccgggagagtcctcgatctctatactggtttgtccgccggtatcctccgccaagccgtctacactactgcacgcctgggattcttcgaaacatttatcaagaagctcaatgcccgcgccaaagccgcagaccggaacgtaaccttcgtcgagcgtgctgcggcaggactgacggccggtggagttgcagccatgattggaaacccggccgacctgtccctcgtgcgcatgcagtccgacggtctcaaggcccccgaggctcgtgctaactaccgttccgtctttgatgccctcgctcgtatcacccgcaccgaaggaatcggtgctttgtgggctggtgcttctcctacggttgtccgtgctatggccctcaacatgggacaattgactttcttcgccgaggctaagcagcagcttaagcagcatacttccctctctgctcagaatcaaacttttgctgcttccggaattgctggcttctttgctagtttcttgtctctgcctttcgatttcatcaagacccgtctccagaagcaacagaaggaccccaagactggcttggttccttacaagggcatggtggattgtgcgcgcaaggttgccaaggaagagggttggttgcgtttctaccgtggcttcggaacatactatatccggattgctcctcatgcgtcagtcccccactattttaccccaactttcccccccactgactcgatctacagaatggttaccctcatcgtggctgattatctcaacctcctcaccaagtaaacttgctttgaaagcctggattatcggtcttcgttcttttacattgctctccgattacacgatatcgcatcgacacgctcagttatgcgatttaatactctcagcacgccacagggtctattgatagacccaatctgctatttttaatatccatgggaagcgcagcgtccgggggaagacagccaattcaactccgagacactttatactccgtttggccgatgtgcatcgcacaaacctataatggcaaatcacccatggtagatgtggttcgacattcggaaaacatggtaccggcgaagggctattgccacatacaatttatttttctttgggaagagaaaatgtcggaggatacgcggccggccggtcttctccgcggaaagccacgacaacagaatgcaaaacatagtcttttgtcacccccttgctcgttttcttgttggtcggcttttgttgtgtttcgacaagcgaataccctcttgtcttgctctgttctttgcctctatacctctaccatactttatgttggtcttggtctgctttagatatgtagttaggtagtatcctcagcggatatagtgtttacttgcctatttctctcgttccattttctccgatagtaaaacattccaagatctctttgtcctagatatggagtagtatgtgagcctttgcactgactttgagcattcgaactttcgagtttccggtgatgactatcatattttctaaattattgtagttaagaacaggtaagttgtcccattgtgtatgtgaatgtattccatcctaacgccgaagcagaaggcaggtcctacagaataaaagcaaacaagagatagacatcccatcgtgaaagtgaaactattcaccattaaaaccgacatcgtaaaaacagaggcccaaaatgcaccactggcagtaggcaagccagatggccgtggggaatcacaagggtacaacgtgaaaaggaataaaacagaagatttgttcaaggtccaaacctgagactcgggaccagatccaacacagcccgtcgttaaaaaaaataaaaagagaaaagatcgcatccagtccacttctcttccgagtccatattagttccgattagatcttctcctcgccaacacgctttgactcaacagcgccaagcggcagcacgtcctcaagtgtctcgtcagttccctgaatatcatcctccacgggaaccgagtccttgatcttgaaaaagacaacagggacagcaatgaggatcgacccgcacagaagaccgaagttcgaggcatattcgttcatatacggcagcttcttctcgtccaacgaccacataacggccgcaccggcggattgcagacccttgtagaagcctgccaagttggcgagcttgcgaccggagttaccgagggcgcccatgatcctagaagaaacaatgttagtcagcatgtcaggggaaaagagggagggattcttaccagtagacaacaccctgccaggcagcatcgtacatgccgtagaagaagtaaaggaacataggaccaacgtagcccttggtagtccaatcccagccctggaaacctgtgattttcgcgtccacatcctcacgggtgtacctcctctgccaggcgtacccactaccccaaataacgaccgtgaggatgaaaaggccgaccaaggctgccctagcacgaatagtacgacggacgcgctccgaatcaagcagagggcccatgatacaagcggccacgatctgcgcaaaccagtacaggaagccgttcagggccttggtgcgcgtgttgaagtaggcgccgttgatagagttctgctggtatgtgtagaaccagttggaggaccagaacatggggaacaggaggacgatccacggctccgagcggactgtctcccacaggccgacgatctcggacttccaagaggggtgcttcatcaggatgacgcgcgagccgtcggtacgcacaaccttgtctgcgtcacagatgaacagagcaagacaggcgcctgcaaacatgagtacgataaaggcgatgtaggtaccgtcgccgacagtcttgtttgacgtgacgtggatgttttggcccaggggaatctttagattgacattgttagttgttgttgatggatggtctagccaattgcaagtatagggctaggtatcaggggctgggctggtcttaccaagctaccgatacaggcgccgatgttgaagatagcccagaaccaggcgaagtaacggcccttctgctgctcagtcgggtaggacatcatgatggtgccctgggcgccccagagtagacctgcgcagacaccgaggaaggcgccggcgaagatgttgaaaccggggacatatcgatgctcggagaccaggagactaatggagtaaatgcagtaaccgattccaccgaaggagagagaaagacggacgccgacacggttgacgacggttccggcgaagaaacccacgacggcgaaggtactgttcagggcgatgttctgttgttgacaacttgttagattgtgcatatagaacgcgacccaatcggagtttcggagtatcaaatgggaagagtggagacgagatagagaacaagtgccgaggtccaatcataccattttgtcagccaagcttgggtcggacttgccaccaccgcccatcccgctcaaggcgttaaacatgcctgggcagaggaagcagacaaaggcgaccatacccaactggatgcgtggcgaggcataccagccggtagagaacttgccgatcttcccagacttgtacatccatcctgcgggtcggggtatgtattcaggttcggaggaagattcgacgggagtcttccgttcatccattatgaatgaagacggagtgatgccgcagaagaatagacgataaaaggtggatgtagagaatattaaaaggtgtgtgtggtgatgaggagagaagatcaacaggaagacatgggattctttaaaacaaaaaaaatcataagatagccagcttgtacaatgtacccctgccactcgaagacaggtataggtactgagtccagattacaatgcagagatagatgtatcaacagccaaaatagtgtatgttgcagggtagcattgggtttggtcacgggctggagctagctttatgtggctggccttagggaaaaggataggcttagatattggtggtagatacaattggacaggggttcttatttgcggggagcttaggtaggtgattgggggccaggacgctttgatagtagtgttacaccgggatggcactgtgtctttgctctggcaggccttaagaataactggggaaagagatgtagtatttgtaggtcagcgacgttacgacgggggctaatatagagttagcgaggattagagtcacatcccgtgggaaaaacggaaaatcccaacttggcagactatcgcgagacttatcgtataagcgattaaggagaaggaagggacgggtgctgattggttggctggggacccacaggcgagtccgctggttcaactgcggggagaggccaaaagaggactagcgcaatcattcttgtttcggaattttggcacatttttgacatctgacagtcaccacgtttcttgatctatagttagtcgcggtataaatcggatggagagttgatttgcagagatacagtcagcttccagaattagtatcagaaattaaattccggaactttggtctgaaacgtttcattttcggcttgaccgaagggaacttcatttaaaaatgtgaaaacgtaaaagcatatcagtcgctgtcttggctttcatcctcggaccccttctcgatcttgggttgaatatcactatcactgtcttcactgtcgctgtcgctgttgctgtcctcgctatcctcgctatcactatcctcactaccctctttatcctgcgctttctcattcggcacatccgcttgtacgtctttctgagcgtccgcatccccattctcttggttctgctctttctcgttgtccgcagctatctcaacctcttcattccccgtctcctcaatttcaacttcctcgtctgcttcttcattctctcctgcattctccacattctccgtatcctcaatctccgcatcactctccgcatcgctgcttgacccgtcgtcggattcaacggcccgagcaacctgactgagcggctcctgtttgacgcgctgtgaggcttgctgagcatccacatccatagcatcgtcatcgctttccgcgtcactacccaacgtaatgccggtacttcgatccttccgctttctcccatcaccttcaaggtgatcgtcttcatcttcgcgctgctggagctcttgggcacggcgaacccgtcgtagtagaacaggatctggccgcaaatcatccgcagtcaacggagtagaacaaacaggacatttgaccacacggatgcggtgctggccccgacgagatgccgggggcgcaatagtcgtctggctgcggctgatcatgtccataatggcctcccgctcgaagctgtgcggacatttggtgctcttcacaggatcctggtaaagtgtgagagtcaatgggcatttgagggagatgcgctcgcgctcaatggcaatgtcatcgtcggagccggcgggcgagacgccacggttctggtttcgcgtacgtgtcgatacccccgatcgcacattcctatcttccatgtgctcaaaccatgtagaggagtgtggcaacggtgggacgtcgtcgccggggaacttggagtcgtggaccatccggtagaagccaatgtagttgttattgctggcatatctagatcgtagttgtcagtatctgagccgtcggataaaacagccaatggctaggaataatctcatacctctctgtcaaagatagctcctcccacttctggactccctccgtcaacttatcgaccagcttgcgactaggcgggttctgtgcattgcgctctcgcatctccctctccagcgcatcttcagaattaccatcgttgggatcctcagtcccatcttcatcatcgtcatcattggctctctgccttgtccgctgttgacgggtctgtctcacccccaaagcagcagcgacattctcaccctcctccctttcaatttgacccagcacatcggttaacccctggagcttgatttccgaatcgacaatcagtcgtgtcttctcctccatccgcgcagtaatagcactgactcgagcctctgcgtcagcaagccgctggtactcctcattggactcgtcgtcgtcgacattctcttcaccttcacgccgacgcgcttctttatttttctcgtatcgtccccgagaatcgctaaggcgctcatttacttcaccacctgagtgtgtgagtttctcgacggcatgttggagatgggtgcgaaggttgcggaggtgatgtgatgcgaggagagctgcgattttgcgctggctttctgctgtaaggggtgcctcggggacctcatattctggcaggggtattgcatctgagactgaggtatggcttgcgtttcgtctgtgcgattgtgctgatggtggatgggactgagattgcgcttggcttggtgtggccgacattgttgcggggggagaattcttgtagtaggtgagttggcgagatgcagattactaggagtattatgctttgattcgggtacagggcttccaagccgttgacaaagaaagtccaagtaacaaagcgcatctcgaaatccggacgcgagacgcgattacgctagtcctgtttggggttgcgtataccaacgataagccttatcactatagaacattggaagtactctgtcttccccgacatactacattgtgacgactgcttagaaaaacgaagtcaaaatgagatggcttaatcatacacagcttcccagcaacaaaggcttcttgttttataaatctgcatttgctctgaaactagttgcaaccgttagtcccactctaactgccatgtcgaagatgcggatggcttggcgtccgtacacacatttgattcaacacagatctgcatttactgaatagtataacgaagcaaccttatgcagcgctatcctctagcggtgcaagtgccgccgctaagagacccagtggctgcttacccgcagcctataactcgatcatactccacagtcaaccccaagagcccacaattgacacatgaaatcctgtcataccctttttgggagtgagtggatatgcccgtaggcaaggttctcttgggaactgtaatcatcaatcgtgccatgcaagtgattgagaactattgttatttgacaagtaagaagaagaagattatttggaattgaaatacaaatggtgagcgaggaagagttcacaatgaaacattaaaagaatccatgagcctataccttgtagaagcagtatgcatggtagaagcctagcgatgtcatctgttagcaactgcgaaaagcaatacacatatggatattactcactgacagcctccttctcttcctctgtcatattcaaagcaccagtcgcgcggtctcttacgcccatgcgatcacccagcgggcccagctcaggatgattcttctcatcctcccaaatatccaaaaatggcttgcggtattgtagttctaggttgtaatcttcggtcaggctgggttgaaaagttagttatgcatggcaacgtgatgaaagtcggaactcacgctcggaaagcctcccagggaacaacgtattcgggaacctcttctactgcctccttcatgaagtaactgtacttccacccgaacggcggacggaagattccgtcttcgggggttgcgccagggaattgaacgcgatagatatcgttgccccactgggcccgctcatcctcttcgacttcaccatcctcggggccttctggttcaacaggtttagcagcctcgcgctccttgcgcgccttatggaaggcagacacgcggctggtaatgacgtctgagttgggacaaaccccaaggaaacgaccacctttcttcaagcaacccgcgacattgctgagcatttggcgtgtcttctcctcagactcaaaggcgtagtgaatggcaaacatacatgcgacgatgtcaaagcctccaccgccatagcgagaggccatgatcgatccaccgggcccggcattagcatcgataccaacccgctggatgatgtcgatatcgcccagccactcaccaaagcaatctttcggatagaactcggcatggaaaattggctgcggtggtcgtcggcctcgctggccgcggcccgagcgcatttgatcgtaccggccccgcgcttgctcaattgaaacattggcaggatcaagaccgacatagaggtcaactggctgaggcgccagctgccacttgcctaaatcgccacccttaccacagcccagatccagtacgagaagcttttgattatcaacaggcggcggcccttggctgtcattcgcccagtccttgctgtcctcaaatcgcgcgacaaatgtctcatccggggagaacttctggataagagtactcttcacccagttgttgaagctgcgtagccccttgatcttgctctctgtcttccgccactcacggcctctctccggaaccgcgttgtagtgttgtcgaaccacgtccgagataccgcgctgctgagagttgcgcatagcctcatccacttctgcgcgctcacgttcctcctgtttgcgtcgtagtgtttcacggtctaagaggccctgtcgtgctccgccgcccggtctcttccgttgacgcggtgcatcgggggagggagagcgacgtggctgtagtggcgatcgagagcgtcggtcttcgcgtggtggagcgccgcctgggctgcgagagcggttgcgtcgcgagaatactgacggcggagttcggccccgtttccggagggcttgatgtctctcctggagtcttttgcgcttggatgctgcgcttgatacatgattcgatccgtctgccgcagtgtctccttcgatgctcctgtgtctgccggtatctgttgaagggtatgtggtattcgtgcgggcaggcgagcgaggcgtggaccgcccacgagctgcatcacgagctctatctccattgggatgatccatgctgacgtgagtagagttgtgaactgtttcagaagtgattcgggagaacaatggtcgcgggatctgtggaggaaaagaaggaaaggtgtatgccgcacttaggataagcctaaaagaaatatataattttaggttgatttcacagaaatgtcgcctgcggagttgtgaaagtcagagttatatcagagtaatggccagctggaggtccagagaaagtccaaagagctccggatctcggccaatcagagagttctaaaccaaccctaattcccattcatctatctacaatctttcaatggattcttagattatgatgtctagaaatgaatgagatagatgtattctcatatttgcgaagtgtcgtgtctcacaatgatcataaatcgaagctatctgagaaaaaaaaaaaaaaaaaaacacaagccgctgaaagacacactttgaccctcttcataaaacccgcgctcccaattaatgtaatattaaatagaaataaagatacgaatgcaagatcattgaggcaagacagctttccgttttggtgacttagccgtcaaaacctgtcttactcgtcgaattttcgcccaccattcgcggtccgctttctttttcgcatccgcattttcttcttggcctgcagtctcggttggtgtgcataggtcggtccgcaatgtatcagtggaggccatggtacgaactctgcggcggtgtttgacctttacggcctccgcgacgatctgccacccagcacgtagttcttccaacctctcgttgggtcgcccagtgccactttgggctaccttgtcgatccagggacaatactccatatgctcatcggccacattgagggaagtgtagacggtgacgtctccattatctttgggtttgtacatccataatcccaggcgacggaaacacgctccacatccgactaatcccgcagctccatcggaggcagtatcccagccgagcaatgctaacgccagggcagctcgattgacagctttggatgtttctgttgagtcttggttgtcaatgtctgtaggccgaatctctccgttcatggataccgcagctttctcggtctctttaaaccattcgtccggaagtcctttgataagcacatcaaggtcaaggccttctggagtctgaatgatatcatcagctggtaatttatcgcccatttccaagatgtttgtatatcgcatgtgaaggcccgacagggcagtatcacaattggtcaaagggagatgttggatagtggctaatctgatgttagtcataggacaaaatgttctcagtcttatttgaactcacaatcacagctcttgtttcgccagggacagttttcgccgtgagcattacttagcatttttgcatactcatccaccagcctcgcacctgtaggcatataggttagtataaaacctcaatcagctagatcagagatctgttgtattactcacggacttccttccgctcctccaccttttcaatgttgaaaccgtcgagctcatcgatttcatcggggagcttcacaacgactgcgccgccgcaatcactcacgcaggtgacgcgcatgacgtctgtacagatccaaccacgcttcgcccattgcacttcattgatcggagacggctttgacgtccatcggtcgacacggcggaaggtctctaaccgctcgagaaaacgttcgcggtcccaagggacaaaggttgggcgcttattcgaagttgcggaggctattcggtgccctggtcgcgatatcttgtggattgagttgcgcaccgctgtgagctccgaacggtcggcgctggccaagcgtactttcttgatcgataagttggcggagagacggtcttgcgccgtcgcaggcgccgtaggggctggtttaggcgcgttgtcggacgtaagaggtttggatattgattcgagaacacggtggaacttccgcttctttgattctagagcgtaggacatattggtgctgggctgagaaggaagtcaagtggtgcagatcaacacaacgcggagagggttggagctgcggcgatcataacgcccgaatgtgtatcagcctgaggcaccaacatcgatattaggcccgtacatcgatactcagcggtcaattctaaatcgaacggtatggatgtcagtattctctcaattagaaatttaattctactgtcaactgttgtacactgttgacagtgctattccactccgacaaatgctccactgctgattggctaaggcattccgtgacatcgtacaatcctccgaacttcaccaactttcttccttcactcatctgccttgaccatggcttctctgaggagctctctgtcgctatggcggagtggtgcgcctcgtttggccaaagactttttcacatcccaatgcctcccaagtcagggctacgcagccaaatcaatccgccaattcggtgccctccagttccgtcaacccagcaagattcaatcgacccttctgaacaataagaaattcttcacctccagtatcaagcgttcaaatgccgcaccggccattgcagaggcggtggaagaaggcacaacgaaaggcaaatcgagcttccccaaaattagcgacaagaccgttgcctactggctactaggcagcgcggccagtgtttttggaattgtggtcttcggtggtttgacacggttgacagaatctgggtaggtggaccgaggtgcttgttttccacgaaaagtgagcttcgaatgctgacggaacatattctggcacagattgagtatcaccgaatggcgacctgttactggctccctccctccaatgaatgcggaacattgggaggacgaattctcaaaataccgcgcctctcccgagtttcaattgcttaacccgaacatgactctatccgagttcaagtcgatctactatatggaatggattcaccggctctggggccggtttgttggaatctcatttgtgctacccgcagtctattttgtcgctcgaaagaaggtctccacgcccatggcgtggcgcatctttggaattgctggtcttattggtttccagggattccttggctggtggatggtaaaatctggcttgaaggatgatctctttgctccgggcagtcacccgcgagtgagccaatatcgtctgactgctcacttgggtgctgctttcgtttgctacaccgcgatgttgtggaatggtctcgctattctgcggtctaatcggttgatggctgacccggctgctggagtcaaccaacttaatgcgctgcgcgacccgaagctggccttcttccgccgctcagtcgctggtattgctctcttggtcttcataactgttatttcaggcggtctcgtcgccggtcttgatgctgggcttatctataacgaattcccatggatgggccaaggactagcacctccaaaggaggagctgttcgatgcccgctactcccgccacgaggaccgctccgatctttggtggcgcaacatgcttgagaatccttctcttgttcagcttgaccaccgcgtcctcgcagtgaccaccttcaccgtcatttgtgccttgatggcttacacccgcggctcccccaccatgaagcgcttcctaccggcacctgctagaaagggtgtccacggcgtgtttgcgtttgcgtgttgtcaagttggactcggtattagtactcttctctacctcgtgcccactccgcttgcctccgcccaccaggctggaagcttgttcctcctgacctgggtcataatcttgggcagccgagtctggcatccttcacgtacagccaagctcttgcagatggctgcgaaagctcgctcccagcagctctctaaaactgctgcctctgctgtaaagagagtctaataatcctgcctctcgagtgtatgaatatgtcgaccagggttgattgtgttcatcgattgccttggtaattgataccatctccattcctctgttgactcgagcgattctcgagtcttattgtataactagaactactgctttcattgtaaaaaacatgttttgaactaaatcaaagtttattggttgatctacctaagtccgaaattgatatcccctttttggtttttttgttcccttttttctcttcttcttcttctttcttgcactttttacttcttcgtcctcatctttcatgtcttcacaattgcgtttcacattttcttactctcgggtttcaggtctcagtgatacttcattcctcttgccaggcacttactccgccaacttcgtagcaggtctcgcagcgcgcgcagggttgcggcgtgctatgatgtatccaacaggcagaccgtcctcaccaataggaatatcagactcatcgtggggccactcatctcccacaaccgacatggtcatatcagaatcagtggataaagtatcgacctgcggctccaagacctggccacgtgcaggagccattttctgtccacctgtattactttgcacatcgctggtggcactaggagttccgttaccaaaagatccgagatccagcagggttttcgcagccctcacatcggcagactcggaggataggcggtcttgagtcccatctagggatggcaaagatagcggcatatcgccacccccctcggggacatgaatagctccaaaggaagcgtgtgtatggtctccgtttcggtcggtcagacacttgcggcaaacttgccagccgcagttctggcagcgtgacatgccgttcttgttgcgcttgttgcatacgtcgcactttgcggtgtgggctgctacttctgagaagttaacgccgactcgccgtctctgggatcggtggtttgcggctgcatcgcggctcgccatttgccggccgttcggtggcacccggtttgttgagaccgctcgaatcgggttggaagagatcttcttcggggttgatgacacctgtgtgcttggaaatcgtggatcgcggagtgtcgtctgcgcggagttaagagtcgactgtgtgggcgctgttgatgcctgaactggctgggcttccttcagccgtagagggattggaggggcgatatggttctctataagatgggcttgtaagggctgagatgctggtttttgcttcttgtctttcttacctttgcccacgttcacattgggttggaaccccacggtagagacctattagaaagttagctatatttgataccctctatttttataaccatcattctgcacgtacgtcttggtaggtaaatccgggctctcgaaacgcctaacacaattttagaatgatatctcagggaaaagacggatggaacaaacattccggctggggtcaggcgggacaagccatccattagctggatagggtgggtacgggttgggaatggtattgatcttttgtggtgaagacgaggaactattgcctgttccatcgtacatgttgtcagaaagatgcaagctcggctggttgcgcttgttggcttcgacagactcgtcgagctctcgaaaagatgggagactcaagtctgggatgcgagggagacgcatggtacgatggggcatgattgcaacagaggtgtgctcgatggtacttgatgatatttgaaggaagagttcctttgagcaagaatgaaaaaggaagaggatggggatgtacgaaatgaaaatggaaaatggatgtggtgtagataaaaggcttggggttgatgaaggttctcagatgcaagttgtactgggcattgttatatacagtctcatgggatcggatgacgcctggtggtttgtggagagcgctttaggacaggcaaacagatcgaaaccttcgaaaatacaacacacaacacagttctactcgattaaattcagcagctgatcaacctctcgtcaatctcattatctatcttgaatcaagtacaaaaggaagaggtttgtttcgaaattggctgtatcgccgagatattcttgagaacccattttatctgctgcgtttatcataaaacagagaattgcatgcagcccccaagacgcatcgcacatcaatagcatcaacatcttctcgggcaatcacgtcattttaatcatttgtgggctgtatattcatcgtcagtgatatcggctcgtggaaatttgctgatattaataacatacggattccttcttcggggctaggctcgataccgacgacttcggcagcagtcttggggtcggcagcagtcttatcgtctttcatcatggggaaggtcaacacttccttgatgctgtagttgtcggtaaggaacatgacgatgcggtcaatacccagaccccaaccagcagtcgggggcagaccgtattcgagggattggcagaaagtctcatcaatcatctgagcttcgtcgtcaccttgatccttctgattggcctgctcctcgaagcgcatacgctggtcgaagggatcgttcaactccgtgtaagcgttgatgatttccttggtgctgtaatttggttagctaaaattccgcgaagactgataggccaattataggcagagcgaatttggaaagaacggggggtttcaagcaactagaagttgggtgagaacttaccaaacgaaggcctcgaaacgctcgcaaagaccggccatttgacggtgcttcttagctagtggcgacatcatctgggggtgaccggtgataaaagtggggttaatgcaagtgttctcgatgaactcgccaactagcttgtcgagcatgcgggcattggtctgaggagccgagcaatccacgttcatcttcttgaggacgcgcttaaggaattcgttggtctcctgagtgtgaagctggtcactaggggggaacttctcgccgcaagcctcttccaatgcagggatcatgtcgactcgtttccaagggccctgccaattgtaagtttcgccagactgagtgtggaatacggtctcgtaaccaccagtaacgtgcttaaccagattcgagacgagatcctcggtcaagtccatcaggtcgtacacatccgcgtaagcttggtagaattcgcaggttgtgaactcggggttgtgagtcaggtcaattccctcatttcggaacacgcgggacaattcgaacacacgctcgagccctccaacaaccagcatcttgaggtagagctcgggggcgacacgcatgaagaggtccatgtcgaggtcattatggtgggtaacgaagggcttggctgtagcaccaccagcaatggcattcatcataggagtctcaacctcaatgaaatcaaggttttcaaagtactggcggatgtaggaaacaatcttagatcgtttacgaaggatatcacgagaccggtcgttcatgatgagatctaggtagcgctggcggaaacgctgctctttatcctggaagccgtagtgctccgaaggaatcgcatgcaagcaaggggccagaagaataacctcagtggcgaagatagaaagttcaccatcgtcacggttcttggggttggtccgaccagggaaacccacaatgcccacaatatcacctctgcgaagtagctcgtgctgctcttcgaagggctttccggtcgagaattgtgcctggcacattacctggatcttaacaccctctgagcggatgtcataaaagttcagcttgttgccggaggtacgcttggtatagatacggccagcaacgcggacggtaacatcgggcttctgttcgcccttctggagaccctcataatccttaacgaatttgcggagatcggtatcgacgtggaatttgtgtgggtagggatccggctgcttagtttcgcgcagcttgttgatcctcttgctacgaatctcgaagtattgctagaacgacacattaattagcgtcgcaggacctaggaatcgacccaggagtaagatcactaacgttaggagtcaagttggcctcgtcatcctcggcagacgatttcttctcggccttgggcttagggggagcagctgcctccttctccttcttcttggcgtccttctcacgctgcttctggcgtctcttcaattcagttttggagactttctcgccggtgacatcatcgagaagaaggttggcaatggaggcagtggcctcttgaacaggattggaatccgccataatgtgtggttacagagaacaagaaagtgggatggtgggatggtgggataagacctgaatttttgggcggggatcggcacggcatgtgattggacgatttcctataactctggggttctttcgaccttcgtgactcacttagattgactcattcctggattggcgccgagatatctatgtaaataagatctttatttgaaaataaaaattatgttttatctgcgggaatcctacttcactttctccgttgtcaagcacctcacggatactaaattgggatgtagggcttagggcactggaggtatctaaaatagaccttctccaagcattgcaattcctcctcaaaaagagctatggaagcctggaagcctggaagctatgctaacacaatagcgatagcctgactacaactttgagcagttgctacagccttgttcctaggcagtgccactacacgtgcctgctttaaagtggctcgctcctcgcaatgactgtttttttgactggatagagtgctatagatcgtccgctatctgaactttgatattttggtttatcaggcattagttctgcaatctgggctagcttagcttactcaatagccaaatgtacagttcaacattgaagtacaacgccatagtatagtaagaagggacatagcgcatagcgcacagcaagatggtagggtagatactttaaaccagtaacaaaattaagtcacttttatcacatcaacttcatcatcgtcaacaactactgcaacaactgatccaacaactgcttcaaaactgctctatcattatagagggaataaaatatctagttttaatttaaattgtttcatgttcatgcatgacagagagagctatggttcaaagactctaacagtcaatttaagaccgcgattataatccacgttcgtggtcgagacccgacctgatggcagcatggaccttcggttcccaacataaaaaattgaaattgaacggaacccaggcccaaactctcccagagttaagggacagtcaacgttaccattccacgacatctttcttcgcgataaaaagggcagggaggctggttttgttctcactgaaagcgatatggaagagattgcggagaaggtatgggcagtctaggacgtcgaggagtaagagaaggatggtgaatgggccggttagctgaagcgttagggtggccactacgcagtgtcgactatcttccatctcttcttttgcccgtcgtataagcgagaacctcttgcatcccatattttttctatcattggtcattttctggttatcccaatcaatttgcttgcttttatttatactatccttgtctccctttcatttaaatacgcctaccgttctcttcatcatcttcttctattcacccatctcctcgacctcggccttgattctgatttctcatcctatctgctgatggcagttgatttctgtctgcagacttcgctttttggctatctgtttctccctgatacgcctcatcatctgcagtagctttcacttttcggccaacttggtcttgagaatcacgcttaactctaatctgtgtccatctgtgctttttgtatgtctcaccttgccgtactactagtgacactaggcatcacttcctgactcttattaatgatcttatggctaaccataactcctccagatttaatcacaatgtcaggcttgtatgatcgagttccgaagtcggaacccagcctagccatgtgtgagtctggttactcttagtagagaaggtcttctcgctgactagcctcttcatacctctagccggcttagctgttccgattccagtgtctcatggactatctgatgttccttctgcccatccaatccccgcctcctctctcgataatcttaccatggacatgaaaaatctggtcagaaaaattcaagacctcagtcacttggggattgaggacagcaagattatgcttccgaaaatatgtgtcgtcggtgaccaaagcaccgggaaaagctccctcatcgagggtatttccgagatcaaggtgcctagagccgaaggcacctgcacgcggtgcccgttagagatcaatctttccgaaagcgacgacaactggaaatgcgtgattcacctatcacgccgctacatctttgatccatcgaagcggatgaagatgcccaagaagtcagagccactaggaccatggattgcgcttggcggccaagacgatgaacatttcatcaccttggataacaagcaggaagttaagaaggctatctggtgcgcccagttagctatcttgaaccctagtacagattcgcaggattttcttcccggatctaccgacatggcacagacacctcaggttaagttctctccgaatgccgtgcgcctggatatatctggtcctggtcttccaaatctatcgttctacgatcttcctggagtgattagccagacagaacaagataatgaacgatacctggtcaatctggtggaaaaccttgtcaaagattatgtttctcaggagcattgcattgtactcctcaccctgcccatgacagacgatgcgacaaattccagcgctgctcgtctcgtcagggacatcaagggcgcgaaagagcgcacccttggggtgttgacgaagccggatcgccggccctccgacgaagcatttgaccaatggcatgagattctggatggaagcaagttcaagcttggccacggttattatgtcattcgaaacaatcctgatccacttgtcagtcacgcccaagctaggaaggaggaagagatgttctttgattcttcactgtggacacgggacctcgccgcattcgaagatcgctttggcacgagacaactccaaacggcattgtctgacctcttgatgcgtcagatcttaggatctttgccctccatcattgcccagattgatgagaagtccaaggcaattgatgaagaactgcaaacccttccaaatcctcccactgaggatgtccaaagaatcctttgggggaaaacttcagaccttgaaagaaaaattcatgaactgttcgatgggacccccagcatcgagcacggttcttcccagcgaaagccgctgcaagagcagtggaacaagattgttatggaccttcaaaccgcacttgcgaagacacgccccatcttggatgttgctgcgcagaaggaccatgaggacttggctgaagttgttgactcggattgtgagttacaaattttgagcgttagcacaacaacgccaaagaaacgaaagtcgcctgcgagttgtacccctgcatcggaaccagcaactccgagaaggactgtgtacagcacatcccacttcgaggggtcgaagtctgccagaatcagtctacagcagctcaccgaactcaagattcgctctaacacagttggtgtaccgaaccagcttgatccccgagcgatcgagaatttgaacaagaggagcgttgagcattggggaagactcatggagattttcctcaaggctacgcataatcttgtccacagtatgcttcttgaagctctggaggaagaatttgcacaatatcatcaaactgggctgtatcaggaacttagcagatttctgaaagagttcatgggcaagctgcgccaggcccatcttcaaattgctaaggattattgcaagtccgagcgtgagataccgttcacaatggcccaaggtcagcatcaactcttgatgcaacagacttcgaacgtcctgaaagctcgtcgattcaatactcgcgcaacttgctggctgaaaattcgtggccatgataacgatgacaagatttcggagaaggtgaagaggatccaattagagcaacttggtcctgatagatactcccaagaacttgaaatgatggccgtaagtcttctagggagatttgctgacattcactaattgcggtcatagagctcgcttgcatactacgatatcgcatcttctcgtttcctggacgtgttgtgccagtctactcacatgaagttgttccgggcttgccgtgcaagtctcgttagtactcttcgtgatgaccttgaaatatttggcgacaacggtgagcatgcacattatatgtgtcaagtatgagattaaaaaatgtttctaatacgtaacttaggtcgcgcccgctgccttgacctcatgacggaggaccctgagcgccagcatcgccgtgctcagttactgaaagagcgggagaagttttcgaaagctcaggaatggttggactctgtccgagattcggatgtcgagatggaagacgaccaaactgctgttccagacatcaaagaggactggtgattcctcaaattgtcgtttcctgtggtctccatgattttgccatttacactggtattgaatgggccaaatattggcttgaggggaagtgttttcggggagttcctgtgagcttcaatactgtttcaaatgtgatggatgggatggagatatgaatcaaatggaggaatggaaagatgtcaacaaggactcctgaaaatcgtgtttgttaggccgcgatgatcgcgaatatacttgttcatacctttcccgaatttgataccaaacatttcggggatcttggaaggattgtaagattttgagcaaggtgtaagcattcgtctctacgctcgagtttggtaggctttggagctaattccattggccgtcgaatccctagttcttggtggcctataacaagcttttgagaagatgcgagtagtatacaaaggtgcactgatatcatgccttcagtcttcttgtgtctggagaaatgaaggcggtaagagtgtatcgtaccgcctttttgaaaggggaaagggcacccaacgatcccaactgctcatttgcctcgagccaatcagcccttttttcataccagtcaaaacgcaatcaggtgtcttcgcctacatcgggtgctctattacatctaccaagacccgcgatgacacgtcgggcagcaaccctgccactgctcagaggcaacaccacattggagtcagcgctggagcaagaggaggatgtttttcttgacttagattacccagaacagcgcattgatttcttcgtgttactgtacagcaatcgtgatgatattgagcgtattgcctcatatcatctcggtctaggtccttcggatacttgcaggactggcgatgtaaaggaatgggcccatggcagcttcaatgtttgcattctgctctatgtcagtaaacaaggtcaatatctaggaaagcatgctctcattaggtttcctttgccctacaaaataggagaactcaacacccccgacaatgtggacgagaaactgcgctgtgaagctgcaacttttatttggatacatacgcactgtccggaaatatccattcctcgactgtgggggtttggacttgttggaggtcaaagtgtacgggacctcaatggatattggccaatagtattacatgacttctaacatatctttacatagtttacaaaaccggagaatatctctctcggaactagacttctctggactctgaaaagatctatcatacggcttatagggttctctctaccctgtccctatatatctcatcaacgtcagacattactcgaaactgggtacttggtgattgactacattggcaactcggaagttcaaatactttcagagacatgggataaagactgtcatgagcaagtcataagaacaaatctttttcgcgggctttcacggatgatgctttctttaagtcagataccactcccccgcataggttcatggaccctcgactgcaatggagttttgcaactttctaaccgacctcttactcttcgactctattaattagaaaacgggggaattccgaccaacatcagtcgaagcctgacctactcagcagcggatgcatactacctcgatcttttgtcttgtcataataatcgcatacagtatcagccaaactctataagcgatgcggatgatggccgggtacagatagcaagattgacgataatgaaagcgctcctacctcatttttctaacaaagcgcttcgagaagggcccttcctttacagactcactgatctccatcctagcaacatatttgtcgatagcgattggaatgtcaagtttgtgattgatctcgaataggcatgctcactgccagcggagacgttgcgtcctccgtactggttgaccggttgttcagtcgatgaactaacaggcgggcatcttgaaacctttagtgaggcctacgaagagtttgtgggtatttttgaggaggaagaacaacagttttcccctatcaacaatgaccattcttataggacaaatcttatgagaaatggttggcaagtcggaaacttttgatatttccatgcattggacagcccgaaaggtctattcaacctcttttctcagcatatttaccccctttttgcaccttctagtcagtcaaaggacgattttgcacgggttgtatcggacttctgggctcccgatgttgaaaaggtgttagctgccaagcttcgggacaaggaggaatatgaaaagacgcttcgccaaaggttcgaggatgctgttattaacgagaaggatcgggattcagagcattaagaggagtttcggtgtttctaacttggcaaaactcatgtatcagaagacctttgggagttcgactattacgctggagtttgatgagaaaaagaatgttatataatctatgctcaaacacgaattagggtgaatatgcgacctccgattgaataactacccttggccaagccctaactgtcctcggtcaggttgtataggaactgcgaagggcacgtcattgaaaggttctcagattccactactccccaactgtcgagatggtcagagattgtcaataaaatagccctctacaacgggtagtctacgtaattcaagacatatatcaaggtaaaaccgttgaaaaataacgtaaatgttataaaacagcgaagcattccagtgtgcaaggccggaaagagtaaaatgttgtcaggtgccccaccgaaagcgtcgtcttggcgtttttggggagcttcggggtctgtctggccttttggattcttatgattctagacttaacatctctttgcataccgttatgcttcatataccaatgcgtgaaaatcacaataaccaggcttccactaaggctgtgatcttggtgagtgacgaaatcatcgcaataaacaataactgacaccttgtccacaggtcggaggcccctcaagaggcactcggttccgcccattgtcgctcgatgtgccgaaggtatgcatctacctctgatttgatcgttcattggaatttgcgccggacaaaattgacaccgcaatccccatagcccctattcgaagtcgctggccaccccatcatccaccactgcctgaaggcggtggctaaggtccccgatgtacgcgaagtgatgttggtcggatactacgatgagagcgtattccgggattttatcaaagatgcctcgaaggaattcccccagctccgcatctcctacctgcgagagtacacggcgttgggaaccgcaggtgggctgtaccacttccgtgatgcaatcctcaagggcaagcccgagcggctgctcgtgctgaacgccgatgtctgctgctcattcccgctgggcgagatgatgcgcctctttgaggagaaggacgccgaggctgtgatcctaggtacacgagtttcgaacgacactgcgacgaactttggatgcatcgtgtccgattcccacaccaaacgtgtgctgcactatgtcgagaagcccgagtcgcacatctccaatctgatcaactgcggtgtttaccttttcgctaccgagtgcatcttccccgccattcgcagcgccatcaagcgtcgcaccacccgcccccgcctgctctcgtacccctcctccgacaatctggaatcctccttcatagccgccggggacgacgaggacgccgagaagagcgaggtcctccgtctggagcaagacatcctctctgatctggccgatagcaaccgcttctttgtccacgaaaccaaggacttctggcgccagatcaagtccgccgggtctgcagttcctgccaacgccctatacctccaaaaggcattccaggccgagtctcctgaactcactcccccttctgccaacatcgtgccgccggtctacatccaccccactgccaccgtcgaccccaccgctaagctcggacctaatgtctcgatcggcccgcgtgtcgtagtcggcgccggtgtccgtatcaaggactcgatcgttcttgaggactccgagatccgccacgacgcctgcgtcatgcactcgatcatcggctggagtagccgtgtcggtgcctgggctcgcgtggagggcacacccattcccgtggccagccactcaaccagcattgtcaagcagggtatcaaggtgcagagtatcaccattcttggcaaggagtgcggtgttggtgatgaggtccgcgtgcagaactgcgtgtgtctgccttacaaggagcttaagcgggtatgtgttatctcttgttttttccatatgccattgactaacgtttcctgtaggatgtgtccaacgaggtcattatgtaatatgagttttggtcatttttggttgatatttatcgccctgatctcctcgttgatacggcttcattgtcgggtttgtctcatctcgtcttatcttatggttggatggttatttgcttcatgagcgtggccgatctaaggatctttttgttttaatctatctagaacgaacccaaaatgaaagagtcgttggatttttttgcattactatctggtatatgtgggtttcgtttccctcgtataattgtcacatatcccagtaatcgagcctgagccctcgaaacgccatgcacccgaaacacctgatacaaacgttcagatataacccccagatgaatatcatgaaatcccgcatgttgtcatcaaagcaaagaagaagagaagaaactccaagtaccaaaaaccactcagcgatacatagcaggatcatacccagtattctcagcctgcctctgatgtccatcctggtcataagaactaaagtgcactcgaggggcggcacggtgattcatcccgggcgcatcatgataataattctgcgcctcaccagcaggcgcatgctccaaattgtgctcataaaccgggggcgcttgatcatggccgtggccataggcaccgtgcatcgcggggggcacattatcataatcgtgcaaggcaggggtggattcgctgtggcggtcatccatcttaacgtcgaaggcgtccgagtcaccaaggccaggatgggatcccattggatcgtagacgccgagacgggtttggcgacggcgcactaccacatctagccagaccgcggcgatgtagctgaccaggccgataacagtgaatgtgaagagggctttgtagctccggcatacggcgatgccagtcgagttgccccagtaggttgttgtgcatgatgttgttatggtgcttgccaggctccagctcaggagacccaaggatagcgcccagaggattgtgaggaggatgttgagcgatattgagagttttgttgataggccgcagctgcagtggattattgaggttaggaagatgttgaggagggagaggcctgatgcgacgaagagctagagggttttatgttagcgtttatcaataagatgggtatgttatttaaatggtcacttaccaccaggaatgaatatggtagtttgtagccatcggcgtggaggtggtaggtaaacaccgccaagatcacccctgtcacgattgaggagagggagatcaggaagcggatgagatgaaatggcagcggcggatatgccgagggtttgactgagggtgatcgcatggcgagatgtggaagatgtgaagatgaaagaaaagaaatcagccagagaagccctacagtcaacaccctgatgatcggcgctccacttgacacgtttgggcgtgcgtcatgtcgctatttttatatttttcatgggcgcagcttgcatcttcgtgaaattgtttcaaataagttgcatattgaattctggacatattgcaatagaacgtaggagatcaagtatcaattaacttcaatatctttcttcaataatcgaaatccccatcaaccaccgttttccccagccaatttagagccattcgcctcaacacaacacccgcgcagagatacaaacatctgctagcgcaaggtctaagtgttcggcctgcattgcatccatcgtatcatttccactttccaccccagacaactggatgcagtcccacacctgccgatcggctccatcgagctccacatggtaaacaaagtcgttggtaggggcaactgtggtcaccgctggaaaccatcacgcatcggcccttgatcattgctcgggatggaccgaaatcaccgcagctgggagatatccaactctggaagatgttcgagaaggagcgtgataccaatatcaccagccacgtaggggcgatggactttctggacacaagaagcttccccgacttgctcatttacgtgaaagagatatctggtaatgggaccatgtcgtcggactatggtctcgaatagatcggcgggtttatcgcgaccggaggaagacacgataaacgtctgaacatagtcatcgtttaggttggttgggtcgtcatctcgcatgtggctatagcccatgaaatagcagtgggcctgttaccattctaccatataacttggctcttcgcgggttctctgggtcgattgcctgcctcgagtccatgtttactttgtaggcatcagtttggggtcgtatttgctgtccacctgtgtctgaagccctatagcgattcggtaactgacgtttaaaagcccactgtgccgcgccatgtggttgatcatggctagtcttgggaatccaatgtacccagagcaagcagtggggattgttgaacaagaagtgcagctctcgggcccaggtacagcgcactcggattgtcgccgtgagggacttgaagcaagatgacagggtcacctacctaatatatattagatatatcaccccacagctacttagaacgaagcggtttccttttaataatgtcaatatccctagtatctcaagtaactatcccatttctcttttattaacgtacatcgttgctttacatatcaatttggacccctcaagagcttgtatagtaacgagccaatcagaactgccgcgccgcgttatcgactctctgccttcggggaacttcgtttataaaaacaacctacaacacctgcacccggtctccatttcccttttacagctcaatcctgtgcaacaaaaacaaacaatctcataggtgccacagaatacacgggctctccccgcccacattcctttaaaaacagctatccgaaagcttgcgagtcttctatcccccaccatgtcgacctacgaaagtacgaatccccatctctcaaatgaacctaaaattctaaagctaacatcattccagtcgaacacaacactaccgacccctcaacggccccaaccgcgcgccgccgccgccccgacctctccaccttcttctcaaccctgtcccagatcactccagctcccgaccacagaccccatgcagtccccgtcccaggagatgtgagcgcagcattcttctctctcgcagaggcgttggatatgatgcgtcgcgaggccgattcagcgccgcgccccgacgcgcaggaaggcaccgactcagataccggtcgcgatctgctgaccacgatgatccagtcgctgctcgcgcaggcggatatgccgccgcggaaggtggagggtgttgacgaggaattctgtgatagtaagaagcactcccctagctcgccgcgcccatcaacctctcccgagatcagcggggtattcctttgtccatcacataactaaccactcttggatctctttagtgctcgaacgcgtcccaaaagcatccctcaaaagctccgataactgccctatctgcaacaaccccttcgtggaagatccctacccgctcgtcgtccagctgccctgccacccgacacaccgcttcgatctggaatgtgtgcggccgtggctgcggctgcgcgggacgtgtccgcttgaccgtgtggactttgcacagcagcagagagacaaggcggaggcgaaaaagaagcttgttgaggaggatgaggaggaggaatgggatggtatgtatggctgaagagatcctacacgagactatgtatctaggtgcatcgtgaactgtcttctgtaatggagacgagactacatggcagtattgcctatcttagcatgagtgaatgactgttgcatctgtcgatcatgtacattttgatcgaatggatattggaagtaagctgaccggccaccatgttgatcgttgtgcctcttcgcccttaatccatatcatgaccaattcctcgaatcctggtttaatgtgcatattcacgaacagtctgtcaggttttggctgttagatgtgattctggagctgaatcgcttttgacaacgtatgatactcccgagaagacgtaagccaccaaacagatcaataatgtaaaaatatagtaaaggaggacaacaatggtgttttgctgtatgacctatacgccttagatccgaaaatacattggcaccttcatttcgagtcaagatcgagatacgcctatccacgagtcctttgtttcctcgttagctttcatactctaataactgatagtactaattaagcctgcttcaaagacctttgtcctctctttgatcaattttttggacagcttcattcattcctttgtctattttttgactactttcctaacaatgggcatacaacttcatatgaagctgcagtcctcgtgggatcttcccgctgctcacatataaatatcaagtcctcaagacccgattcatctcatttatcattccagtagacattctcttcaagtcataccatcttccactgtactcacagactgtgacaggacttcttctgcggattaccacatattatcgggtattttctactcccattcctccctatacaactttatctacttgcttactctttaagttactatcaccacgtttatgaatctcaaccacaaattggcaatccagatacttatcagtgagtatcccagcctatccaaccaccccaatgtctcccccgctggagactctcgcgcttgttttcttttttctattactgggaatgaccgtcatgataatgatgattcttgtcaaggaatggaccgagtaccaagctatgcagttttggccgaaactgcgtagtactcgcactctcgatctggagtcgggcctttatttactaagggacgtaaaggaactgacatggcgcgttgagcagatagaaactgattttggtcgcaagatgcacctcgctgaatacttgtgtgaataccatgatcaacccccatctgcttaaccgctttataactgtcagcataccttccgataacagacgcaagacgcaaagaccgaatatctggatgcctcctatgcgtagggatagcgcatgagatactcggcccgagtgggtcaccccagttctctaccccatactcccatgtctttcgaggcggctcaccttgatggatctagagtgggtagggttatagtactccgcagtacgggcggcttataactttttgttgaagccagatcagtttgaatgtgcctatggtggatatattacgtcaatatctaccataggcgctgttattgttcattttagtcttggagccgtctatgaaaatagaaaggtggagggaggattatagcgactttcgagtaatagccaactcaatatccgtagtcctggtaaaaaggtcggataaagacagctgccaagatactctgctagacatattttacaattagtggctgctttgctggtcggcggtagaaatcatttgttaaacttggaatgtataccaccttagtccagtagggtctatatgaatcatgaattttacagaagaaaagaattgtaatagtccaaaagtatttcagattttccgtctactctatgtacagtattcggtacagaattcatcacacgtaacttcaatgcttcataaaatttcctcagcccgagccttggatcggatggccaacttgcctgcctggttgatcatagcttcatagccgcttcgctcgagcacaccgccatcattattgacaacctcacgagcctcgagttcttcaacaaggcgctgattctcacggttaccctccagcaagaacttgaggcacatcacagcatgttctttgatgtatgggttgtgggcgtcgaaagcggtgcagcaaagaatcgcctccacgccgccgtaacgacgaatctgctcttggacatcgggacacttccagacaagcgaggagagcacaagcacgaccagcttcttgagattgcgccattcaaactcagagggatcctctgtgatcggcggggactcaggtcgagagtcgacgctgtcggcgctattgtcggcagggtctgggtcgctagggtcgtaaggacgttcgacagcaacaggggctggaggactagcgtcggaggcatcgtttgcggtgtcgtttcggggaggagggggagggggcacggagccaaaggacaattggctcagctggcccttggggatgcttgcttccaactccttgatcaatgtcaccaaatcatagacaatctcccatttaaccagcaggttcttccagtcattgttctcggtcagcaccgcgaagaactctaaaaattggtagacaccttcatagacccgttccatatcccatagattgagcgggaagtcctcagaaagagcccgctcggcgcggatctggccttggagatagattagagcacaagtctcggggatgatgttaccacggaagatggtgaagatgtatcggacagtgaggatatcaactcggttgagcgagctcgggttgcgagggatattaggttgagccgagcctgtcacagacgcaggagagtacttggctcggaagatgtgggtaagtatcttgatcacaacagcctgggccggagagatgatgtccttaggctggccgaaatccgagtaggcatgagacataaggccattcttaagcacggcctccatgatctggaccatcatcttgaagtagagctcgtcgtcgggaaggtcccatgccgcaatgaaaatcagtagttcacggagtaggttacgtcctgtctcctgcgtgagcagaatatgacagcggagcgcttgcatgttcctagatccattccgttcgccgcccttgaggccaaagctgtccacaataccggcctgaacaatcataggcaaagcttcgatttctgccggtccaaggactagagggatatctgttagaagaccccgctgttgatcaccaggacggccacggtattcgtcgtcttcctcttcttcatcatcggcttctccgtcgacgccatcgtcatccacatcatcctcgccatctccgtccacgcttccgtcagccatatgatccaggctgtgtgaatcatcatccccaactgtgtgtgaatcaccgtggtcatagtcgtgctcttcgtcgccatcgatatgtgatggctcctgaagccgagccatgagttcatccttggcctcttggagggtctcggcagccgattgagctgaccggggcatactggtatcttcatctgtaacaggtccatcgacagcgccaaaatcgttgatctctggaagatcagcccagcaaagacgagggaaaccagccgtgagactgcgatcaatagtcaggatggtcttcttcttggtgatttcgtgttcctcttcttcctcgtcgtgttccctgtggtcatcgtgcgcctggtcttcgtggcctttaggatcctcgtgctcttcctcgggaagcgcagccgggagctcacgagcgcggtcctggagatcagaccaaccgtcaaccttagcccctagtatcgcagtcaaagcagctctgatatccttgacctggtctgggtctctgcccatttcttgaatagcgctgaggtctcgccctaaaatcctctccatgtgatccttaatgttggccagaagcagcatggcagcctcttccttgatagttgccggctcccgggggaacttggcgatagtctccaataacaaatcctctgcagtttggtcgtaaagtgcgcgaatgggcgggttgatgacacgctctccaacttgtacaataggcgccactccttctcgcgagctggcatcgtccaaaggctccttgggttttatgatgttcgtatcagcggtcgaatggtaaccaaacagatccagccagagaaccatcttgcgatgctcattgtgcataataaagttgtgaaggtactgtagacatgtaatcagaaggcgcttatagaggttgacgactttctgccatcgctcctcgttccgcgcattttgctcgccatcgaagcctcgagcagtcacacgaacacatgtgtcgatgagagctagaatcctttggtcaaatccggtttccgccgcgaggttctgtgccttcttggttgtggcgaggagattgcgagcgattgtacacagatcattcaagcgctcaatgtctttgaccagtgagaaataattgtatgcgatcagatttgcagatgagtgttcgtagcttgctgcggggcttttccatgcgaaagattgggactcaaggacggggattgcttttgtgaggacgttcgtgagaccttgccagatatccggcgacatgccgagattgtgactagcagggcgcaacggattagtatacaaagcatgcaatggtcaatgatattgcgatcataccgaacatcgctctcctggtgtgtcttgtacaggatctgcttcccagcggcaagcatgtgctccaagcgcttgtcatcaatcatgcctcgaacttcgtagtggctcagtgtccctgcaaggattaccttgagcatgagctcagctggcgtgcataatggctttggatctgccatactgcaaagaaaactccagctgtaacgcgtattccttcaaacggtaaacagcgcggggagatcagagtgggatgaagaatctaagattcggaggtgtggagagacaaattttccgcccgcacgaatgttatcgttatcgcccattcgcccattctaagctcccagggctattattacgctcatagctctcttattggagaactcagaccttggaaggttccttggacgtatgttgtatacttttaaggtaaaagtgctccaaattgcctataatattcaaagtctataaactagttgataatactctactagtgtatccatggatgctccatagtatttccgtggtgccgaactagtacattttctatttagaaaccaacaagaagtacagaattcgacaaaatagtatgaaaaccagataaaaaaagtcagtctaaaatgacaccaataagacaccaaaaatagccatatactagtccaagatcaatggttggtcgtactactattattgtgaattaaaagaactatatatggttcgtgaaggcagtgattgaggcggcaaggtagtgttcaatgagagggttatgaatcggtggcatagctatttaaactcatcgccttttaagcatagtctcactttgaatgtcgacaacttgtagatagcgtcttcggaagtatattttaaatattcctttaaatcaaagttcaaactccacagatattccacacaaagaggttaatgccggatatctccttagattaacggacagatagtcctatcacgtcccgaagattataccaaaagcccatatcgtagatgttgtcaatatctctcatagtatgaattcgcttccatcgagggtcaggaggtatgtctgatcctggccgacgagcaatgcaattggactcggaggccaataaacatccttcagttgggggattttcatcagtgacaaggatttgatcagtatgaacaggccacagttgatcatacggatccataggaagagggctgtcgaaaatgagactccggtttgtcttgaaaacgaagccgtcttccacgtcttctttccaatcggtccactttgcactctcattggttgtcaccccagcccaaatgagatatgtatggtacgccaggaaagagatcgacagcggggcagtcatcaccatcagtagaaatactgtcccaattttgggatcagcagcgatcacaataccccatgtgttgatccaggttgtccagccttgcataacctcctgtatctctggcggaaccatttgcttaagtgtcccggagaggatggaatggccaaggtaggagccgtagatcaacatgacagaaagggagaccaagagcgagatgaagtacacgcaattgttagccccgacgcagttcatcaaccatacacagtggtggtcatgtcgagaaatacaagcgcgacagaagctgcaatgcttgctgcgcgctggcttgaggaatttgcaggtgctgcattgatgtcctggatgaaaaaggactcggtcatacggatagcgtctcatctcttccgcatggttctctgctgtgataaatgacttggtcacaatacacttgtacagcaggaaatatggcaagctgatagttgcgggtacccagagtcgatgaatgctcgaaagccgaggccacgcagccgggacaaagatgccttctccaatgaccagcaaggagacaaagaagatctagtatgcatggtcagtatctatgtgcataagtattaataaattcagagacccaccaggacaagcgggtggttttccttcaatacatagctgccagatcgattccagcatcgtaatacccttccgccgaacaagcgattatcgacaatcgcaattccatttggaaagtacacccacagtaccctatgcagccaggcgaccggggttttccttgagcagtcagcgcagagcttcaagagtttctaagttgccagatagctcaccggaaagctggcagcctgccaaatagcgcgataaaggtgaaagccgagaccgccagtatcaccagaccaacggttctgagggcccccattctgaagctcaagttctatcggtaagtccaaaggatatacttttctgtctgcatcttctggcggtatccttcactgttcctgccttccttgactcgtggtcggtccatgcggtctcatcgaaagtcgtcggttgtgtgtaagccacgtgaccgcgttctcagtctcggcgcgaaccgacggtttcagctatgacccttgtgaattgagactgccggaattacatatgatcgaatacaagaactgacaattggctcagcgagacaacgcctgtctggtaccatagcccgctgctgaatgggggaagagccccttgcgacacgtcaacacgtgataccgcgtcgcagacaaagctggcctactttagggcgtgaaagctcgaggaagagctttttgcggcttgatttctgagaagctaaaatggcaactttcacaaatgactcctctcgggccgagactacggcaacgaatctgtttcaaggcgcacgattctggctatctctcactgttccacaaaggtcgaggtttaaagaattaattaaggtacttcgggatcaatttatcttctttaaagcttgcagaggttaatgggtatctagcaatatggtggtaccgttgtgctgatggagaaggatgccgatgtgaagctggtggatcacacgagaaaagacctgcctaaggacacgtacggaacacggaactttactcgctcaagatcagtgtactaattcaatattagattctcatatcgatatgtagagcgttctatcagcaagggacgactcgaagatctagaagcgcaccgggttgggccatctgcacctcgtccaatgggtgcatctaacattcccacgaagagcacaagatcgttctataccctgaaagaggaccaaatattgtttgactgggtcgaaaactttgaacaagagccaggggcgcctattcaaggcaataaaatttaccaagatctaagtgaactggtatgatgctctcttggttctgtcaaggctacagggcacacacatctaaatccgatactaaccggtagggcatagtttcccgctcacccatggcaatcctggcgtagtagatacatcaagcatcttcgtggcaaaggccgtccagggggcggcaccccattatcatatgacgaacttttacagtctgcaccaccccaaggaggacgcccaaagatcttacctgcccgaatttccctaaatgactccacagcaaaatctagctcaagggttcctcggctggcaccccctgctccggcccaagcaagtacagcaaacagcccaaaacgaaaacgagatccggtccctgaagcatcgaatcgaaagcggctggatgtttcacctacgaaaagaagagcaattgaagcttctgacaccgtgggccttccctcacgccgtcccaatcctgatatccggagaccccaaccaaagtcatcagatgtagcggccacaccaccctttactacacggccagaaagaggcccacccggtatcccgttgtcagataccggaccgcttcaaggccttgggattccagaactctttccagtcctgaacgcttccatacagagccctagccgcgtccctcgggagacctcacaacgacaacgaccagcagatgtagcagccccgccagccccgccagccccaccgcggccattgggggacaatgccttcgcacagtctggccgattcaagaaacaagcatcgaatcctaaaccacgagtcaaagatatcttcaaagacccagtggatcccattttcctagagctcccattcttaccatcaagcccagcatccgagacgactgacgatgacacctcagatgtgcccgacgttgatacttggattgatcaacgcctggctctaggtgccaaagaatcccacgtgttcgatgctctgcggtgtacaagcatggtcccagggatggcagataaggttctcaaatacctcaccgctggcaagggtattcccgatgatatgccgggagtctggacagcagaggatgatagctgtttacaagcggaggattattcgcgggtgcggcgagtgttgacgaagcacggcgcagaagcgtacaaggatagatgggaatatttcagcatggcccggcagacaggacttattgaataattgaataatacacatgaaatgtggaacttgaaatcacacgaaggatgactacaatggacgagttgaaattgtgaagtacatgaacattagcgtgcagctagaaacgaaatactccccgaagacaccggtatgacctgcccagaacgcaaagaggaaattggaactcaaaagtaaacatcaatgtaagggaagcagtgccatattcaaaacgcgttggtcgcagtagagggagaattgtagcgatggccactcgctattgcacatccgaaattgaagaaacggcctagaaatatcacatgtgtaccagtttattggtgatatatcgacttgtcaatgagcaggatagatttagttatccttaaagacactatgggagacgttaggaacgaattccgagctttcattaggagattctaactcacagatgcgattcgtagaacttaagcatctagtttgatggttagcatctttatcgctgttttggcacggtgtaagaaatactttcagaggacacttttcatagcaggcctggacggacagtttcgccttgcgtccattgttgaactcgagccacgccatgagacctgcctcgccctcccggacaattgtatccaccgctttcacttccttatcccagttcttcccctttggaagccattgaatgccattttcttcggacgagtgggaagcttgactggttgtctccttgggtgctgattttcggcgctttctcttggcttcgctcgctgcggggcccggtgcaggcttagcaggcttcgaatcacccatagatttgcgcttgcgacctggctttcctgccacgcgtggctcttcgggcctcttcgggcgaccaccgatcctctcgtagtatgctgtgacaatatcggaggccccatccctatagtgtttgtcaataaatgcgcgaaacagatgtcgaagcccaacaagcgcacaaacttacatgagaccactttcctcttcccatgtttggtcttctaacttgtcgtaacccttccatttcacgaagagcttaaaggttccctgtagttggttggcttctcggcacaatgagactgagcgttgtgaacatacatcatcaagccaagcgtgatcagtaatatcctcgacgacgtagctgcatccagtcagagacatgtatcgatcagtcggccgcaatgcgcaactaacagtccttcttcctcatcctcatcctcatcctcctcctcttcgtctccttcgtcccgggagtcatggaagtcacggtcgtctttgccatttgcttcgggtccatttctgtaaggaatgtcggcgacttcttcgtcggatacatcttcaatgggagctaaggaacgaatgaggtcaatcgagatgctcagcattgcgcgtgcgacagatcaacattaggagaaaacactcacgaggcatgtttcggttgaacggtgagatgagattagagagtttggaaaacagattggcgattagaggattgaaacctcaatggcaacggtaaattcaggcgaaagactgtcgcatccagagcaatcgagacagtcgagaagcagaaacgcgttaaaggcggacaagatacactataccgcttttggcagtcagaatttcatttgtcaaaagtgcatttcgggaagctcccctcaaggctcagcttgcaagttcacactgctttgtctttttacttactcttcattatttctcgatctccttgtcgggttccctcctttaataatctctatattttgccaggtggcagcccaccgtcaacatggcaatgcgtaaggccgcacccccatacccctcattcttgaaatgtgctgtggctaactatgtggattttgatcttcaacagagcttgatatgtctcagggtgattactcctcgaataagatggtgcaactacgattcggtcgctgacatcaagggacagcttcaatcttgaaggatgagcagggacggccgtttattgtcgttcgggagtacgttcaccgctacgctttatcctccgttttcaaataccattgagagccgaaaggttgagacatgaaactgacggggattcttttgaaaacagtcagggaaagaagaagagacaacatggcactgaggccgttaaggcacacattgttgccgccaagacggtggccagcattgtcaagtcttctctggtatgacagtcggcaagcaatgaatggacagatatctgactctcgtttccagggtccccgtggtcttgataagattttgatctccgccgatggcgatatcaccgtcaccaatgatggcgcaactattctcggacaggttcgaccctgaagtccttcccccggagagatccaattctggctcgagagactgatgcgatggttacggttagatggagatcacaaacaacgtcgcgaagctgctggttgaactttcccagtctcaggacgaagagatcggtgatggcacgaccggtgtggtggtgctggcagcggccatgcttgaacaagcctcggacctcattgacaaaggcatccaccccatccggatagccgacggatacgatcaggcctgcgaaattgccgttgccgagctcgacagaattagtgacgagattacattcagccaagatgataccaccaacctcctcaaagtggccaagaccagtctgggcagcaagatgtacggattcttagctgtatattagttctatttgatgctgacggtttccatagtgtctccaagtcccacgatcaattcgccaagatcgctgttgatgccgtgctctcggttgctgactttgagcgcaaggatgtcgactttgagttgatcaaggttgacggcaaagtcggtgggtcccttgaggactctctgcttgtccggggtgttattatagacaaagacttctctcacccccagatgcccgacgaagttcggaatgccaaattggccatcttgacctgtccctttgagcctcccaagcccaagaccaagcacaagcttgatatcacatctgttgaggaattcaagaagctgcaggactacgagaaggagaagttcacagaaatgatccagcagctgaaggaatcgggtgccaacctagtcatctgccagtggggtttcgatgatgaggccaaccatcttttactccagaatgacttgcctgccgttcggtgggtcggtgggcctgagattgagttgatcgctattgccacaaacggtcgtattgtgccccgattcgaggatctgacccctgacaagctcggcacagctggtattgtccgcgagatgagcttcggaactacgagggagaagatgctggtgattgaggagtgtgccaacacccgcgcagtaacaattttcgttcgtggaagtaacaagatggtgagtcaaaacctgcaccatacgtagggagatgtgccggtagctaacttctgctacagatcattgatgaggctaagcggtcactacacgatgctctatgcgtcgttcgcaatttggtgcgcgacaaccgtgtcgtctacggtggtggtgctgctgagattgcttgttctatcgccgtcgaggacgccgctgtcaagagccccggcattgagcaatatgccatgcgtgccttcgctgatgcgctagatgccgtgcccttggccctttccgagaactctggtttgagtcccattgagacccttgcctctatcaagtcgcgtcaggtcaaggagaagaacacccgtctcggtgttgactgcatgatgactggcaccaacggtacgcttctagacaaccatttcataccccgtcattttcatcggctaatttgggttctgtagatatgcgtgagcacttcgctattgaccccttgattggcaagcgccagcaacttctgcttgccacccagctgtgccgtatggttcttaaggtactgctcccattaactctttctgtcgcgctcgatgctaaccgtcaatcagatcaacaatgtcattatctctggtgatgatcagtctgagttctagatcactagattctagtcctattccacgatggtaaaagaaaaaaaactgatgattctggtttgctatgtaaaaacatggtcccttacatagaacccttttagtttcaataaaaacgaaaggattgataatgtctctatctggtcactgcttctgaccttgctcttgatatgggcctttatacctacatctcgtagaacgccgcagcccagaacggcatctaattcgaacaatcaacatgagcgccatacgcatacgcaggtgaacatagccatacacctattggtacaacatactcatctcgcccatgaatcccaaataccggtatcatcccttgtgcctcgggttcacaacatgtgaactggaagtccttaccgaaactacagcaatcgcgaaatacataccagtccggtatgtaaaagcaacctaagccatccagccaggagacaggcttgttccgtaggagatccgtgcttccattcgggatcgtgtgggattgtctgtgttcacgagggtcacccgatatgccgaggaacaacaacgtacccataagaagatagacgcactcccaccacaagatcaactgacttattggcttttcggagcctggcttccattccccctcggtgcgcatttgtggggttgccgattttttccgtcatgtttctttcgcaataaggtcttctagactaatggacgaacggacctaagtagctagtgacatgtcccattatggggatatacatcgtgtggttgcccggatacgagagtgaaattctaatgtttgaaatcggcatcaggcagtcgacgtatactttcttttagacagcacctgaagccttgcgtgccaagtttaggtcatgatgggcaatgcgttagctccttggactttgtcattatgtattctcattcccactcacgactgtcctcgggatttatgcgagcgtcagtgctaaatacgactttttctctttccttcctaaataaatccttgtggggcgaagatgagatagtctctgcaggcacagtatagaagcccccactctacgaggtagcctgtacgacaagaagattccgatatcattactaaagagtagttatctacgcgctattcatacctgtagtgtcgttttaatacaagttatacaaattcagaacaagctcattgtcccgaatgtgttgagttgtcgtgacccggggaactacgtcgagaaacaaagtgtcggcctataggacggactggaattgtgaattgaatataaactcgataataatcatagcttaggcaattgacagagcttttctcggaatgacgcccgaatcagaatttgacggtgaaggccgcgtactaagtctcagtcttgataagatatatttatacttctaaaaagtgtagaaaggatgtcattatttccaacatctttcagggcgtagaggaagataaaatattcttttcttttcccggtttcctcctcgagccggtatagtagagctttcaacttcttgtaggctttcagctgttgattccaaggtttcacaatgcatggaagtacaaccccagttccccgcgattcatggaccataggattcggaattttgctagttactacagctcaactgagggcgagacaggcctagactagatctattttctctctttcgtttcacatgtaaactcttgacattgggagctggctatcttaatctggagtgttgaggagatgccctcttatacgtgtgagtttatattgctgagcattgaaaatgatgggtcacttcggtctagacggagaaagagtcaataatctgatatatcgcttagccagaccccatatactcagacacaatagtgccaacagctatccgtcgtattttgaaacaccagctgcgccagaaagccattgaactcgaaatactgtattgcaggacaattccaaagcaaacgaagtaatagtaaatgccgtaaataaagaccttataatgtgggcatattaatatattcataccacagctgcattgaggattcctatacatagcatacacgatttcaatgcatcgcatcccacggcagatcaatttaaagtcccccatgacctgcagcgggtcgtgttttagagtatcttcattggaatatgagaaaccgggcggcagccgccaccacaggagacggacgtcagctccagcatagccgtgggtgagtaccctagggcacaacgtaccctgcttagacagattatgtacttttgtacatggattgggtcgatctgggccgaattaaaatccatcgttgtggtgtgacaccgctgacaggtacgagggcaagccccgatctggcgcccattttcgtggccgggattatattacgtgggacacgcgggtctgggtggttgtgctggcctttctgtctttccttttagtcctcttgtatattgtggatggagagggatggatcaaaggtacgttgctggtcggcgtgggttttttctatattctgtgccctgcgttctcaatacgactggactgggctacgttgcatggtcctgtaggagagtagagaatgtcttatgtatttttttctttttttctctctctcggtagtcgacatagccgcgctatgcttgaagaaaacttctgtcggacatattgtttccgcagttcagatgacccggtactggcagctctatgtggaacaagatgcgagaagtagcatggtccagccagaatcgagacgtcggtaaatatagatgttgactctaaatggcctcggaccgagttaatgtcgcgtcagcctcatcagtgctagaatacgaatcacccaggttgctcacatgagcatcgtggtttgacgtggcttcatttcgttcgtagtagtctagtattgggctcttagacgtgttttatcttcccgtgacagccgtttgatgtaaattgagtatcttcctcggctcctggtgcaccactgccacttcccatatatggtcatttagtgcttcttcggggaatcgttggtctcgtcacacgacgatggacctgttaaccatcggtatatcacaaacccagtgatcgctatagttatccgagtttcatgacaattcgactgccttcttcggtctcaccgatctatagatgcttgcggtctactccgtactaaattttggaaatttggtatagggcacggcatgtattgttcaaggagtgacaacacttttcagaagtctgcattatctttctaattgtttcctttgtctgtaatctatttgcggttcgataggaaatagtgaatggtttgccagtgagtgcgttggccgaaagcggctttccatggtctggggtccccttaatgtggcttccccggattttgatccccgcaaaaggttggggaccttttgtgtatttgatagtttgtagtatggcgggagtcgacatattcattccaaaacataagttctaaaaaaaagtaatggtatccacctatatgccgaatgtgtacggagtactgtaaaaatataccgcccatccgtagctttcagcttgcaacttatcttcaagcctcaacaaaacatgtttgattaggtgtatgtaatagactttatttttagtcgatatctaaatattctgcgacccaacacagctgacggggaagcaggtgacaaacccggatacattggcttgatttcaggaggctccagatcagagcctaacacactgacaggtgcacagcacaaacgaaacataaaaatcggctctaagactttaaacccaacacctggtcagcatctacaatcagcagtgacagaatgccagcacaaacgatcaaagatatcaatcgatcagctggcacatggcgcgctgtcaaagaagccacagtgacaaccgtacaggagaggcttcgttcccaatcaggggttcgactcctggtggcctaggctgcgtgtcgatgaaaccctccatcttaaccaaaatcagcaaccaaagacagcgatctcagcccatcgcccgccacaatcacacgccgagagactccgaaccgagagatctttatacacagccgctacagcccttgtgggcgagaaataaaagcaaagagagctgtcagaagatagccgccctaaagtagccaccggatgcacatggcccgatgtagtcggcttgcattgtgggggttgttattggccaggcaacctaggatcaccacgtatattatctagttgcttacgcgatacaagagtataaaaggaagaaattgtttctcttccataggtaattaaatatatggatcgagactttaagtcaggtggttttgtgaattggactatttctggtgactgttgtctttgattactttgtatctccgaccatcgcaacaagcaaaaagcagttatgaccttttcgggaaaatgaatggtttgggatttgtacttggcatcaggtttcaacaaacatattctgcacaaaaggaattaattgaagatctcgaaacaggggtctggaagagcaaatatgaaattaaccctagtcatgacaggggctgtttgttaccaactcaaataccagtcaggcagaacaagtaaagaaagagaagaccgtaaccaacattcatatgtatttttttctggattgtactccttatgcttcctcagaaacaatttgcaatgacgaggtggcagatgaagtataaagcccgagtatggaaccttgcacaagctgcaacatcaagggaagtgggcccgtaacgttggaaaaatgagaacgacatgccagggctaccgaatatctgggaagatgatctgcagaaaccatagagtggatatattattgggccacaactccaaacaaggggaattgtcgacgatccgggaccaggggccgcgcagacgagatgggctagacctttagatggtatgcatggatgtgcttttcctttgctactttgtgtaggttgaacgagcaacagaaattacgcacatgaccatctgagcccaagctataataatagttagatgagactgcgatattgaagggcaagggatgttataaaaaacaaagacatacacccaattccagaacgatcctcgtctaggatagggatatattgggtgtcacctgttccagtgggatataatattttgaagccgactactccgtatttgcagagagccaaatgtatgaaagaagccgaagacattcagaagaaaatgatcgtcgcggatatgggaatcctgcttccggctggatcgcagaattcagaaacccacatcccatcttcgtctcagctagtttcacggggcctatcagcctcgcggatacagcaagctttcgatctggaagattccctggatatccctagttgaaggtcacatgcattatagataggccgatctttgcagagtagagagaacagggcgaaaggacacgaacgcatcattacgtacttggagtattccgtacctggtagaagaatatcgcaaatgcatgttgttccgcctcacttggtatgaatgtttctagattgagtttatcaactatccacctgactctgtaaatctagaaaactatgtcccgcttcgattccgctgcccgcgagtatcccttgttcgtaccagtcaactcttaaactagcttacatatagacttcttgctcaaagtctcaagtctcaattaatacgtgaccggtctccttttcataattaattaccgattcgaatatatatatcggacactaagatttgatccgagcatagacatttaagccggggaagcgggctacgaatagagtgggagaaattggagggatgtgattcgctgcctcgttgatgtgatacaaagagaacccctcgggccgtctaaaagtcgcgacatatcctatctactactccgtatcatcgctcaattttgcgatctatactccgtatcaacatccaagacaaagagttacgaggccgacacggcggtaattcgtgatcgccttgacctcaaggccatgggaatgaataggagtaaataattgacgatagttaccctcccgtacaccgttatccgctagatgtttggtcattcgagatggtgacaggcaccggctgtcacattggaagagtgactccgttagtttgttgatgcgaagcacgttgattcgggaccagtgacacatttaagcttaatctgtcgattcaaaactacaggttcaaggtccttttaatgattatttgctgtcgaatccctgatagagctctttgttatatctaggtatgatacgatgggaggtgagtcaatatgctgtatgacagtgatactcgcctgataggggatctagatacccctgcggcttcgagtccgtgtagatagattcggaaagctgatagtatttgttttcgtgctagtacctaggtagctcacatcattattgggtcgggcaggtagctgtcatctcaagccgttgcgcgaatcaatgagccaaggactacaatgacaagataagagaactggagatggggcccttttccgtgtcacatgaactaaggtgattggcgattcatcaacatagcccaaagcccaaatctaggagccagtacgagtagatctcaagagaatcagatggtaaaagacggggaagtcacgagcccctgaggtggcgcggttcctggaaccccacatcatgtgacgagacctgcgcgtgactttgccactttatgagctgtccgttcggcttattatgctcatattagacagaatatggtcattatacctggatacgcgagttgcacggcatgcgattgtgggtactgataccccagctcccgaatttgccctatcaacgctatgtggagctattgcaatcctgaagcgcgctccttgttatggcctgcgcttactccgtacatcaggtgccatctgccacggccctaggctcggtctcattccgttttggcgcctccgtctgcccgtgatcatttcatgacaaccatggtattgtacagcgcatataataatgacacatctgagtctgactggttccccatcgcctgcgggaatccgtttagacctcggtaccctggtatcctatgccctggtccaagtggggcgtgaccttccattttcccagtcccaagctattggcagccgcatccttaacgcgatcgctatgcagcgtgcctgcccaggtggtttaatgaggtatcttacgtgcggttccacaataccatctggtaccacctgaatagtagccagtgagacagctggatgtgtagacgagtagatgagtcaagagagatgggttctttcattgcacttcgttgtttctcttatcagattgattgtcgagatgacttccataagccatggacttgctgtgtaagcttcgcagataggaagggggtcagcagctatgaaaaaatcaggttgcataagcccagacaatgtttcgcatcctgtagatgattgtgtagtgtcatacatccgcagggttacgtctgttacgaacgaactgttttgaacgaatcagacgactccggtagtttttgtggtgaaaaaaagtgcacagtgattgactggctgatacctttttgactgggatcttctactaaggaaacgaaatatcaaacgaccttcatagagctattccgatgaaccgattttagactgattttcccatccatatccccgcaaatcttattgaagtctgggtacattttcagagtcttagatgatgacagcttacaaacttctatgtcatatagttaatcataccccgtataatgacagggaataacgacttggtcagatcagttacttatataggtaggagcgattttctcttatagtcagggatctcatggtacaatatcacatgatagatgaaacgtgcgcctggtgcgactttgccctgatcggccttccaggcgcccgggtatagtagggaaagatggttcctttccgccagtccgggcctaagggcaagggttgctgtaagcgttccacccccgtgacagaaaatcttcttacgtattctggcctgctgtcaatccgtttctcttcaaggaaaccaacactacaatgacagctggcagactcgtgacgatgtagcctaggtttgtgacactctcgactgtcgtgtcctatttggatagtcaaagatagaaaatctaactaggatgtgtccattcggaagataagaaaagagaaagggcggtaaggctcactccctgcttcaagtgaagctgtggctgactttctttttttcatccacatgattgaggcctaaagtaatttcctagaatatccctcggaatcctcaccgatgagagatgtgtagataaaatatacctgttttgaaacaaagcaatgcatccaaaacggaaaacgatctactatggaagaggtacgctggttccccggcatgcagcagggcttggaactacactatccctttctcctggataatagctgcttgcgggggaaaaagctggggaataacacagatctcagccggaatcaacaaaaaccaaacagccattagaggaatgaggcgcttataggaaagtgtataatttccaccggaattatttatgtttcaatgtctaactataaccttgagctcatgacaattcatacttccggccatgataggctcgagaatgaacgagcctcaagtcccatatcggtgaccacaacgtggcctgggatcttagaccgatccctagtcttttgtacgcagtgtaccccatagcccgaatgtagagcgtccgtgacgaaaatagcttaaacgcgacatcagtttggcaggtcagcgggaccatcgaccctgtcagcaccaataactagcagtttgacagttcatcagtcagtagacctcttttcttacatacaggagtgaagaatggattgtcagtggcgagaagtaatgtccaacgaccattgagatacatgaagtggcgtagagagagccctggtctggacttcgggacagtcactgcaactaccgcgttggagtgttgccgtctttcgatcagtacattttggcattttctttctattattttatcatttatatattttctttgccccgacaggtcacaggcacttagagcattgatgatttctcattctttgatatgaatgtggaagcagctaccatagttcggctttagcactaaagagattgaaattgaagctttgcagggaaccttgatttcaccgtcggacggttcaatagttaggtaatcagtactccgtggatcgaaacagaaactggtattgacattacagaggtatttttaggaggaaggaaaggaaagtctaaagtcgtggtggaagacggttggaaccatggtaaggtgtatccgaatacatggaacaggtatcgatgtaattcagggccccgtgatgcgatagaattttccccttcaccgaccgttatcctcggcctggagttatttcggccttttagtatttttgaattttggattatctctccccttgtattgtcatgttcttaccaaatattcgcaaaattcttattcttttcttaaaagggaaatattccaattttcgattttcgattttcgattttgattttttgattttcgaatttattaccgtccccctctccttccactccactccacaagtgccgccccccgtcattcttattatcgttccgactccctttctcttcctcttctattctccagatccttctaacagttcacctcactctcccaacctacaatctctctcacacccgtcaatctcgaaggttcatctcaatccggtctctcgataccccctccgtttctccgattcttcgccccggaatctccgcacagtggcgctctgacggaaaactgacggacattcgacaccccatccttcctcttgctttaaaatccaaattctttcacgatccgcatctttcgtgtgagcattcgattgaatcctagacgccaaacccgattgatcgacccttgcaacacatctcagggcccagactcaaatttcaaggcccatccagaaaccggttgattcttacgaactttcaccaccgcatcttaagcgccgtacgaccactatcgggggagacggcgaccccggaaacatcaatcaacgattcctcaatcattacaatcgcttcaactgctagttgaggcatcgcgaaaatgcctttaacgacaccagttctgacggtggacgcggacaatatccataaggtggataccgcgaacgctcaaagtcttcatgggatgtggatgggtaagtgacaattctgctggttgagggataccttgttttgctgacttctcgcgcagtcttttcaaaatgtgccgactacatggaccagggccgtcgacttgaaaatctcagttggcggttgtggacgcgcgaaaccttctgtgtcgaaccggaaaagtctaacagcacttctgccctcccattgctacgatccgaagctgcggatttgcccgaactctccgccagtgtcgagtcggccgcgtctgatcaggccgagcgaatcgaagctcacatcaagcgtcccaagttcaacgactaccgaccggctgtcgttcgagaggactcactagcaagcctaggccgtggaaaggagaagcacatcacatcgttggatttggagcggatggtcctcaacatcaaggaaaagaagcaactgcagcctatgccttctcacgtcgagcctgctgcccccgttgtcgacatcactcctcgcccatccacccctactcctccttccgtctctaccgctcgtcaagttccgaagttttccgtccgaccgaccccatacccccatgagtcgactgagtcttgctcgacgactgcccccgagggcaacgatagcgacactgcacaggtcaacgcgtccgataccagtgtctcatcttctggcattctttctagccggccgcaattggtcaaatctactagcattgttcgtggattctcaccatcacacatctcatcttcatttagatcgcaaccaagattgtctatcgaccctagtccttcccgtgccgctacacaattgaagccgtcggcattgaggaagaagggaggcatgtttacactgggcggctcctctggggatgacgatgaaagctcatttgaggagcgcatggttcctgctcaggagaacgcgaacggtggagggttgaacccgaaaaccagcaacccagaatctacgaaaaagactgcctctttcagcaatcaggtctcgtcccacatcattcctaacttgaaggacatcagtcgatccgacgaagacgccattgagaccgatgatgaagtctcagagagtgcgattgaagatgatgaagattctgattgggaagattcaatcactgaaggtggcgggtctagcgttgacgatcaaggagggatgttccaacgggttgattcccggcccaacctggtctcgcgccgctcgatgcttactatgatgatgcatcaaccggcccgcatgcaaggaaacgcgttccggtccagccccgcacttcaacgctcgcggttgacctcacccagtggtccatctattcctcagtcacctcctgacagggaagaggaaagcttagtcatgcgtggtcctgatgttccccgatcgaagcctattgtcatgaacaccaacgcctcgcagtctatggcacactctccgcgaaccacccgtcgtaacatgcttgctactgaattgacagagtctctccgccgacatcttctctgggaacgccagcagaagagcgcgactgcgaacgctttcctcaagcgtcgccacaccgcccacgacatgaagaacctccaggattaccctggtcccaagggtccacacaagggagttggtccgaaccaggctagtgctgatgcagaccctaattctgccaactttgacctgggcaagaatggctcctggaccaactacaccactgactacggcccctgggagtaccacgtgaagggatggtagttcattcgctgcgatccacctcacctacgcgcttttcgaatttccacggactcgtttgcaacacagcccagcttttctttcttgacacgtacgatcacgatcatgcattgcatatatggcgcaaatctgggattctttttctttctgctttgtttttctcgatctcatcggctccgggggcctggatgtcatcatgacattcactgggcgtttgtcctgcatggaggttatggaacatcaatttcgagggctattttcttcttacgaccttaatatccatgtacagttcatatacctcgtcccttttcgggtcatcaacggttgatggcacatgggtcttgtctctttgcgtctcgctttccaagatatttccgggtggctttttcatgcccggagagttcaccaaaaaaaggtgttttattgctatcatctatctcagcgctgcgtcttttgctgcatgaccatatttgactgcagaaaacgcctagcatttgtttcccactcccgattatcatcggagaggtagtcgttttttttctttctccgcgatacctgataccacaacgtttatgttttccaattcttcatccggcaccgatcttcgcgatcccgccagaacttgtacgctacctgatgacagctaaaaacaaaaaatccaatgaacgaaatcagagaaaacctgtcctcacctgcatgtcgtatttccttgactgcgggcttagatatcagagaagaggcttgcatatgcctggattggcggtctggatctacgtactgtagtagatagctatagctctgctgcagagaggcacggaggctagcagaggtgcgcacagccattcctgcgataacagtgccagaataatcatgtggaaattcagggttaactttgtggcgctgacacgtatgagagatgagtctatcgcataacactgatacctgtctgcatgtacttattcaagtggtcataatccatttggattaaattgcctaactacgtgggttaaacgatacttgactgtatatatacttattcataatagcttatactgggtacatctacaagtgccgtatgttgtactccccataaccaagaaaatcagtgttgatctacaatcacacccggaggcatccacataggaaacgatagagttacactcctttatgaatcaaatcatcgcatatcccttaatgcggtaccacctgcctagacaggtatttataagagtttagccatggattcatgaatggacgtttcagtgcgaatctccgccgatcccagggcgccaaaaataataaaggtcaggtgggatgcagaaaaaaaaaatcaatacaggggtcagtcaaaaagcaccgcacctaatatcccagggcccgttcggaatcttgaaaaagatgccaaaagtacctatctttcccgagaagcgaacagttcgcgcagatctagaacacagaccagaaactcggatttcttttctaattatggatttgaccatatgtcatatcacggtcttctaaccctgaaaggtcgtgatgttgatatttgatattacaagctaatttaaccccgtacagccccgaagtctttaccgaagagaagtgtccatagccgttccataaccataaccgacccgatcgaccggcgagatccctcggtgcaatcctctttattcggcctcgcattggccctggcacatacgagaagctatgtcatctttgcattagtttacgccagagctcccgcggcagtcgggaggtggtgggcttgcaatcgactcgacaacttaagtactcagtccgcggtggctttctcgccctgcatgttccgcagggccagctcctcggaggacccgggggtgagggtgattggattgggcttgcactgagtggctggcaaggtgagttctaggcctgttgatacttgtatacttttgagatttgtatcttccctgcttttgcgttgaatccggggggcttactcaggcgtggggttgtgctaccggtactccgcacgacgtacaaactactacctactgtcaggagggaatcacgttccgctggacggcctcattatgacaccatgagtaattgtgattgtaatctacatggagatcttttacatggatcttgcctgggttatgcatgttttcatcatgattttgccttcgcttacattttgccatgtcttactggcagtagttgcctgaaggatgaagattgacgtgtagatcttgactaattatcacgttgatgtcattgttggcataattgcgtttccatgtgctttctcggttggatttgcttattcccatgaagagatgtgtgaggcctcgagatgtgtcagagggtaaatcagagtggcgtgcaatgccaatagaaggagccttatggggtatacatcgtaacccttagtatgggggtttaccgggtgtccacagtcgtcatgtggtagctgcacatgaccggtgcacatgatccgggggtggagccgctggattttgacacccgagatctatttctatgtgttatgtcgtacgtgtcttgacctcacgtcgactatcttccacgtctcatctcgtctttaaacaataccaatagacacttatttgacctaacattgtctaacctacgtggtagtccaagtcccgtcccagcaaatgacgtatgtacaactcccttctccaactttgaactgatgtggggatgaagactttttcttcctaaaactcccgacatcatctccattctaggaacgtccccagtctgtccggtcatatccgagccgtggggctccaatacatagaaccattcactgccggagaaacaaaggagaaacaagcatctgacatccaaacgaagccaataacatggatataacagatctcatgttctctgtactcactgaggaaaagcaatattgactcaatatagcccagatcaatacttttatcccaagcccctttcttccatgctgatccaatgacaatgaatcattcaaggtgaaacaagagcctcctctagaaccatcaccaaatctctatacattgcgttcgcattccagcctccatctctagaatccacctgcccagttagggctaactcctccctttcccggccagaagagtctttcttcatcttagcttcatacagcaaagtgggtatcacggtggatcactccgaaccagggacaggcaggattcgctgtctcctttttcaccggtactgaaagtttctaattgacgccgcacggagtacacgcatgacaacttcggctccgcatttcctatttggggcttaatacaacttgttacatacatatgttatgggtaccgcgtaccaacccccacggacccctccacgatcagggcttcaagaagaggcgtcgttggaagaaaaagtggatgtcgcctgcttgctgtacgattgacgaattgacgcctaactggctcatcgggttggtgatgtgcgcccgacgtgcaatcggcaagccgatgcagctgcagcatatccccgaaagctacgatatgcgaggatgcaaggatatcgcgctcgtgagctcgaaatagggcgtcttttcggtgttcaaggatcgagggcacttcgcatgcagctttgatcgctttgtccaggctcttcgatgattgaggcgaattcaagacgcgcaagagtctccgttgatttcttcttgatcgtcctccgctatgaagtgatcggccagccaggacccatacaaaccctgtctaggcctctcgagctctagaacagagccgatccttgctttggcgcggttttattttaagagttggactagctacgctttgcagaattcttgttattcaattcaggggacatatcgaaaatttaagtattagtgcggcaagattcatatcagctgttccaaatcacttcacgacatttgccactacaacatatgcacaacataccacgtttcgtggctgttccgaatgatattaatattcggcgaaatcccgaatgaggcgatcgggattggcccccgcctgttttccctgggccaagaaagtcgacattcacactgaatctgcaaatctcaacacaattacagcacctgtgattggcctgaattattattctaggccctccggtggagacgaatcacgtgtatcagctatgtattccaggagctctgtactccgaaaccccgcaagatcaatatcttgaattgctgccatattgagagaatcaaatagtactacttgtattaattgtattaaacttcaaggaggtatcatatatcccgcaaggcatatcaatatatagaaatgccgacatgagctcaacctcgaaagctgcaagctatgtccatggtcaaacgcgccaacgcccatggaagaccgagcgcgatttggaaggcttctggaaggacgatccggttggccgatgaattccaggtccgattcgcgcttttccgctttcggtgtttatttacggtattgtattcgtctcttacattaccatatttgtacagcggaagcccagtaccgcggagcggagctcccttaccgatgcattgaccgaggctcaacccaagtacggagtatccatggatgttctcggtatattgtactttgtatccttgtagcttgatgaggagtttctgatggaacattttttatcttcttttaagcagcttatcttattttaaatttacagctggcaattagggctatacatctaagacagaactatatcttgtaactccccgagggtttgggctcgatatcagtgggatcttgtcttactagcggtagccacagggcttatgcatagaatataacattagaggtcccactgtacatccgagtgacctccaggtagcctcgccaaaaccatttacgccacagctattattgtgtgggatttcagagttcctccatattaaagtgggatcatcttagtatcactatgcactgtccaattttttgggggcttggctccactccctagcttttcgaaggtcgctttgctcttaccttattaggtacgcaggcatggacatggtcccgaaaagaaaccaagatacatagccgttatatctagtggatcgatgttgcatcccggttaaacgcgtaccctagcaccccatcgcgcaggatggagttctagaaactcgaaagcgaacccctcatctccgcgcatcgcggaccgaccgctatccgtgactggtggccgttgaacatagtgcgctgagcttgttgcgcccgtcgggtcgtattccgctctcggtgatgtttatctttttctctcctcgcatggcctcgccggggctgggtccttgttaaggggatatcccccggcatggatgtgggagataaggcgggtgccgcgctctgcgtggtatatgctctgctggcagatgaaattcggaatcatgtttccctcttcgctctttttcgaatagcttttgtttcatgtattctacatgcattggtgatgtgcaggaagattattgccaatcaatgctagtacttggttggttttggcttcctgttgtggcctcgagcagatgatgtgctttaagacctgcacgccacagcattaggttgggatttggatgtgaaatgacgaaaactactttatatagttgagatgaaattcaatgtgaggaccatgcaatgactatcattaagatttgtgagcctgcacttgtacattgtacaacatacgatgaaggcattagtgaggactggagctggatagggagagtccatattagaacatccccgaacatttggagatcttcaactagaaacctccatccacctgggcaaatcgattcattgtgactcacagctcacagtatgactggaaatgagtgaatgtcaaggcgaatgagatcatcggttccgcctgaagtcttggcattcgactgccagtaaaactgtaaacaactataacttcttgtatagcttcatatcttcagaccttaagataactaccactgcttatttgtgaccactttgacattcgacgtcacgtggctgtatctcttcacagttttccttccgttttatttttgcttagtgccgtgacttcaaatatcgctacaagagttcagacggtcgcacacctcggcttacttactgtgcagatctggtcctgtcgatctcctcaaggtcacccgatctctgcgttggcagcgcgcgtcacctccaacttccaagtcgcccagaacccggccattccattctggatcatctctcgcaacacggctcgaggctcagtttcagtatggagaataggtcatttgacgaggcgggtccaacatcccaaggtatgtcaaagcaaaattctattattggctcctaaaagccatctcgccggaagcttttctcccaatcaattctacgagatctacttgggcggattcactggctctcgtattttcagcccccctgttgcatgtccatgcaccacatgttgcatccgccacaaagcctatcagttcccatgttattttctccgaaggctttgttggcgtgcagggtggccccggtctgccaatatgcctggatcggagtcggccgcccgcaaccctttgtgatcacacgctcatgatacttttgttcaataggtacagcgctgccatcctctttgataagtgatgagttgtcagcggtccggtcgcatggcgttgcatcccccgatgaaacgagtgctgctcgccagtcatcgacccagcggaagaaatgtcgctttttcaaaaccaaaaagggtaagtctacattctgagtttctgtctgtaaaggatatttgcctgttttttccctatgcaattatcagcgcgtcattgaatatggacttgagtgccacaaacaagatcctgtacgcaggatcacccaaaggggcacttataccgaggctatgaccagaattgcacgattgatctgtgccccaatcctttgcgcatgtattctcggtgcttgtcatttgataagagggtgatgttttgttcagattatatgctaacattgctcaaggatgccgaattggagcagcatgtccgtatttacatgatgtctcggccattgagaataagcaggcaccagccatttccccgggaaatgaaagccagacttcggcacaagccattgtcactggggtcgagaaactgagcattgcgaaccagtcgaagcaggcctctgccgcagctcctgtccagccccaaagaccggtttcgaaattggagcagtcagacccaagagagtttcagatcaaccaattgaggcggcgttaccgtccacaggaagtcaatgatactcaaggttctactttaacctttggcttggtaccttctgatccggacttcccgttcgagcttgaaagactccaatgtgtccttcatgtcccaagctcatacccgaaggggcggcccacgcttgcagtgaccaattctgaaatggaagcggcgtatcaagaaaatgtcgtcagaggtttcaatgatattgtcgattttacataccgcaccaatggccgaggaactcttttgggttggctgaacagtctggacaaaaagctcgaatcactgctaaccacactggagcgggggccgacactgaagtttttcgctaacgttggtgatgtatccacgactaaagaacctgccaaggccccggagaagactttaacccagccaggatcgtctcaagatcatggtagaacgccgagtggtgctgctaaaccaacaccacagccacgaactgtagtaagtagacacacagccgaagcaaaagctacagccgagaagagacgagcaaccgagacaaaacagctcgaggcgcgccttggaagactgccgatgtatcaaaaactgcaagatggcaggacatacgttattccactccagtcaactaaaaaggatcgcctgccacgaacacttcaagcgctcaagactgtgaaattgattgtgccacaactctacccactcgaacacagctcgatcaagttgcaaggagtcgaaggccccgaagtgaaggccacagaagtgggatttactcagtgggtagaacagacttcgcagctgagtctggtatctcaagtcaattatctggcaagcaatatccataagttcgctgaaacacccttaccagagcaggtgtccgcggaggatatgcctctgactgttgaagaagacgaggatgaggttgtggaagagcctacaaaggcacctgccgtgccctcaacccaagataatgaagacaagccacatcttgttgtcattccacggccacccgaatggtcggttcctaatcccaacagtggcgccgacgggacatcgggtgagtcgagtcacgaggaagacgagtattcagatgaagaggaagacgaagaaggtggtgcacccgttcccgcatcagtggacaacaacgcacccggacgaggcatcgcactttccttcccattcttagagctctacggaattgagcttctggaactcacgagcctcaatattacaatcaaatgtgaccgatgtaaggtggcggtcgacatcaagaacgtgccacaaattaccgatgagaagggccagatgccaaaaatggagtcgtgcaggaaatgtgctaataatatgagcgttggtgagtacaatcaacctcattctcctttctgtgatgggttgctgactttcgtgtgcagcattccggaggcagttgatgcattctcatgccaatcgtgctggctaccttgacttgggcgggtgtacgattggggacatgctccttaggttggttcttgcaacatcatcaaagtgctattttttaacccatctcgctatagcgacttcatcccaacttgctccgagtgctcgacgccccatccggcaccgggtatacctgcagttcgcggcgagagtgccatgggtacatgtcgcgagtgtcatcgcaaaatgggtaggttatgatatgcagtgtccgttgtttggctactaacatatccaactttagtgttcaagatcccggaggtaaaattccttctagtggggaatgcagcaggtaagtcccgatatatcgagcccacaggagacgctttttactcattgctgtatcatctagtcacttctcgtggagccctccctcccaagagaaaggttcgtataatctacagcgtgtatcatcatgataaaatctaacaattatctcagcctcaggaagtcctcggtattgtcgcaggacaagaacttccgcgtcgtggtcgttgccagcactacgccaagagtcaacgctggttcaggtatgtggtcccctatccatgagttggtagcactcgaaaaataggttatactgacccctgtacagattcagctgctgctcaaaggttttcccttgtgacaagtatggtttcctactaaatgcatctccatcttttttcaagtgcttattgatttacctagatgccacgatgcggaaaccgaccacccgaacgaacacgcaaatcgtatgatatgtggctactgctcccgcgagcaaatctacaggcctgagaactgcggtatttgcaaagcagtcttgattggaaaggcaggtagtgggttctgggagggcggaaaaggaacgagaaatcggactctaatgagtcggaaaggtatgtctctcatatcaaacttcctgcgagtgcactcatctaatggggctctagatccgaggaaattcaagcggattggagccaatgctcccacttcgagttcatcgaagcggaagtaaatgaatgaaaacgtgattaagactattgtatatctcaatatatcaagtacaatagtttatttcaatcttaaaaaaccctttcctaacctaagtagcgaaaacctaaacagagcattagtgtctcatcattaatgtcaaatctcatcctcacctgatcttcttgttactcactaattactcgcacaatcaaatccatcagaccaaaatgtccgcgatactgtactcgctagaagccgccacctgcgttgctatatgggtgatactattgataatgagcggcgctgctataggtctttgtcctgatccagatacacctgccccgctttcatcgctaagaggaatcccaagccaatacggtacagatatattcagagccaccgaatcataaaataaagaataagtcggtgcaaacacagaaaaaatgcctcgatgataaggaacgtttgcttgatgaatcaagggccatattcaagcggaaaacatacttgatagagcggcttcaacttcgggaagaccgaatggcaaagggcgacattggtgctgctggaccatatccaaatagtacggcaagacatctctatgagcttcagttcaagattcgacagatttggcgtgagcttgcggacttgctggatcgatattgcgactgaggttggacttggaggtcaacgggggattactggatgatcggagttgctattaagaatggggttcgagacagtggtaggagcaataagttacttctgattgctcggttgatctagagtagagtaggtatctgttcttttaagaatccagatttgcttcattcaaatcgcttgtttcgcctgttacttcccctaaagtatctcagctggaggagcaatatgacgctgatggcctccatcaagtacagcaaattggaaattcttttgcagccttttatacaacacatatggcaccatctctcctcgagctgcaagctaccaatcaccactgggaagccggagtgcacaaaagcggacatcccatatctcgacttgaattacgaaacatcggcagaccatgacatgcttcagaaatattatattaaagtgaaagttcccatttcgctaaatacaagatttatgcccccaaactgcaagaactcatagaaaaaatgcccgactatacgaattcttttgtcctcaaaccaagttaccgcggagttcctgctctcgttcgatggcctcaaataacgacttgaagttaccggctccgaagccttcgaagttgtgtcgctggataatctcaatgaacacagtgggccgatccatcatgtgctatttgtttagttagtataaatccacgaatacttgagtcgttagtttccacataccttagtgaatagctgcagcagatagccaccctcatcgaaatcaatcaaaatatccaagctgcggatggtctcgaagctttccttgagtactatgccagactgcttcaagcgggcctgcatatctgtgtaatatgtctcaggtaccttgatgaactcgacaccacgtgctttgaggttggtgatgtcacggataatatcgtcggtatgaagcgcaatatgctgtacaccggcaccgttgtagaagtcaacgtattcctcgatctgggattgctttttgccctttgctggctcgttgatgggcatcttgacgatctcgttgggcgaggccatgaccacactactcaaagctgagaattcactataattagaaggttagtcatggttcttggagatcagctaaaatatattataacactcacgtgcagatttcgttgtcgtcgacggaccagaaacggtggaagccaagggccttctcgtagctaaccagtggtattagtaattgaggcctaatcaaacaatctaggcgaaacttactattcacagatcttatccatctcattccagtcctgatttccaacacagtgatcgatacgcttgagatgaacaccaggcaagaactgcaaaatgggatcctcgttaccagtctcagcacggtagcctggcatgaagataccgcggtactcgctgcgctcaataagagtatgggtggtctgcccgtaagtctggatagtagcagtcttaacatggccactcttatcttcaagaaccttagggttagagacagccttggcaccattcttcacggcagcaaagaagacagcatcgacgttgtcaacctcaaaggcaacatcttttactgcatcaccgtgcttctcgaggtggtcatggatctcctttagctcggcttgttcttcggaattgaaacggtcaatttggtcaagggaccgcagaggggaggtcaggacgaaggtgatatcgccgttgcggatgacatgagagcagatattgcggcttccagtttcaaggcccttgtaggctatacgtttgaagcccatgcgggtgatgtagtagcttgcggcctgcttggcattgccaacgtaccagtggacatggtcgtaaccacgatagctggccactgaagatgcctcgtcgacaactgaggggggaggactattggaaatagctgaaggagccattttgctgaatctattatgtttgtatgatggtgatattgggggaaaacgtagaaagatggtagtacaagatgagaggcggggaattcgagttgaagttaaatattcggttcctttgatttcaaatagctggtcctccagtagccgcaagtcatctcggcagatatcttcttcagtccacttttgttactttacacttagacgccttgtcatagctcccggccgcacggctatttcaggaccctgaaatatccggagatacccgggcccgctgagatcatcgtcaatatccgcctggagatcgatttcttagattcacaattcttgaaagattttattttcttcttcaattattgtgcatagaaccgattgcagattgagtctcacaatagcccacaattcctcgcctcaacaccaaatcccaagatgacatctatcgcaactgctcgcccatcattgacatctaatgattccgctgtcctacaagctctatttgacgccgaatcctccccctcatcgggagtcaccattgatgcatcccttgcttcatggccatcatctctgaacatccccgaaacagacttggcatcgctcaagcagcgcgaaacagacatcatccgcaagctgcaatcaaacaaatcacctagtatagagacagtccagtcagcactaaacgacttcgacactctactcacccagcatccaacatatccctccgcatacacaaaccgagcacaaacactccgcctgctggtcgatctgatctacatcccagaagcgggtagtgatcaaagcactcacaccgaggtggccgatgctgccctctttgctcctaaaacctcccagctttgctcccgcatcttctctgacctaggccaagccataacctttgccacaccagcctccccggctgatgcggtctcaacaactcaggcacggctattggctgatgcacacacgcatcggggatacctgcttctcaaagcggcgcgcgtgaagaaggctggttctggtgatgataagacaggcccagagcgcctgcgtggtctttcggctgatcagcttgaagaaatggccagtcgggatttcttcgttgggggtcgctatggaaataaggttgcgcagcagctttctgtgcagacgaatccctatgctaagatgtgtggggctattgttaaagaagcgatgaggaaggagcttgaggagtgaagattatttagcctgaagaaataatttaatttgcgaagttggtatatgaaataatgaagcaataaggaaaacctattttgatagatttgattgaatgctggtatcttcttatgctacagaaataagaggaaatgtgcacattttctcttcgcagtgctcaggcccaaaccatagcttatgcctttttgttggggttcacaaagtgccgcttgagaggcttccagctgtgctcgttgtattctggctgcaccttctcgcaggtcttaagaccccactccgagacgccgaccatgtgagtactaattattgtcagcaaatatgaagtctcggaaatgatagcggaaatcgaacgaacctttcgaacataaaagccatacttccatcaccaaccttttgaggcttcagttcagcattgctagctccctcaaaagcacccgagtccggaccatgagcgctcatgacgttgtgcaaactagcaccagcaggcctgaaacctccgccgaccttcgcatcgtagtcaccggaaattagacccatgaactccgacatggtgttacggtgataccaaggtgggcggaaagtaccctctgcgacgagccagcgaggagggaagataacaaagtcagcaacggcggtaccaacatggtccgacggagctgtcagcacagtgaatatagaagggtcggggtggtcgaatgagatcgaaccgataacattgaatcggccgagatcgtatttgaaggggtagtagttgccgtgccaggcgacaatatcgaaaggggtgtggttctgtcgcgcggcgaagagcgtgttgttgaatttgctgtaaagcttgtactcgctttcctcttcatcgtcgaaagaggcaacgggggcttggaaatcgcgtgcgttggccaggcagttagatccaatggggcccaactctgggagctggtagtggccctggtataattcacagatgtatccccggacagggccgtctgggagcgtcactcggtatctgatgggagtgattagctgttgatcgtatagcggatatggaaagacacccacctaacaccgcgagggataacgcagatttcatttggtcgcaaaataatgcgaccgagctcagtctggatgtccagcacaccgtgctgaggcacgattaggaagtctccatccgcggagtaaaaagcttccttccccatgtccttgcccgcggcatacattaaaatacccagtccttgcttctgggttgggtctccggaccctgcaatcaggtgcagtccatgtacccagtcaaccttctcatctaaatcgaaggggttccatcgcagctggttagggatgtggtgaagcttatcggtctcagtcgtcatcctcgtatgatacgagtcggcatcctccgcggtgaagttctcatgagctgccgcgggtagaatccgatacacccatgtctgcttattctcatggcggggtgcagtgaatgccgttcccgagagcttctcggcgtagagtccatatggagctttctgcggggaattttgaccgattggtagagctccttcgatggcttccgtcctatttactcattaattttgggttcattcgttttcatccgtgttgactatgtgtatacatactcgtgatacgagtcgaagcccgtctggtatttatagggatcagggtggttgaacttagtgacaggcatattggcagtgatttttgatgttggatgatgcagaccttgtcttttcatatattccagatcaaccgagggtctcctttcaaaagaagcaattaatgtgaggtcacaccgttccgcggaaatctgagaattcccgcgattatcctcattccgcatcggttgaatgcggggggagcggaccagttccgccctaccttcgaggggctaaacatcatagtcaggtagttaaggcccgtcgctttctctttctttgaacttcttcacacattacatccatcatggcttcgtggtttcagattcccaagaactcgccgttctcgctcgccaacatcccgttcggcatcatctcaacacaatccacatcaaaggccgctgcgattgcaattggtgatcatgcattgaacttgagcacatttgcttcatctggaggcttctcacagcttccagctatcgagcagcacctagctgttttcagccaaccgacactgaatgacttcgctgcgcttgggcgccctgtgcaccgacaggtgcgcgagtatctacaagacgtattccgcgccgacacaaagttcccacaggtcctcaaggacaatgcctcccttcaacagtcagctctgctgcctttgtctaaggtcaccaaccatgttcctatgcaaattggcgactataccgacttctacgctggtctgaaccacgcctacaacattggtgtccttttccgtgggccggccaatgcactccagcctaactataagcacctgcccgttgcctaccacggccgtgcctcatcagtcgtggcttcaggaacacccctccaccgtccccagggtcagatcctggcgaaccccgccgcggaccccaaggtgcctactttctctccttgcaagaagctcgacatcgagctggaacttgcttgctttatcagcaagcccaatgatcttggcaagcccgtcccgattgatgaggccgaggatcacattttcggtctagttctcatgaacgactggtctgcccgtgacattcaggcctgggaatacgtccctctcggccccttcaatgcgaagaacttcggtaccaccatcaccccctgggtggttctgcttgatgcgctcgagcctttccgcgctgccggtttggagcctgcaaaccgggagtctctgctcccctacctgcgcgagaagcgcgccgagagtgcctacgagattcccctcgatgttgaggttaccaaccccggtggtcagcccactattatctctaagagcaacgctcgcaacctgctctattctttccctcagatggttgcccaccacactatcacaggctgcaacttgcgcaccggtgacttgttgggatcgggtactatctctggtaaagaggccaagactgagggtagtttcttggaacagactaacggcaagactcctcttaagctggcggatggctccgagcgtatgttccttgaggatggtgacactgttattctgcgcggtatggctggcacagaaggcaactatgtcggctttggcgactgtgttggcactatcttgcctgccatttccctgcagtaaatgacttatataaaaaatcgaattgaaattcgatgaccaatgtttgatgtttcatttctattgtttacttctacactatagaccttggaatggatggatgatcgcccgctatactcttgtcaaatgtcattaaacgtcagtaccagtacgacgatgggatattctagcccggactagctaacccactatttacaatgctctcagctattccttaatacgaaactcatcgggggtatcgccctgtgatctccaatgccccttcttaaccgcctcttccatctccaagttcttcacaatctcattcgtaaccgggaattgacccaggtcaacaccaaaccgctgagctccccaggcagcaggaatcaagcacaaatccgcaatggtaatggaatctccaacgctaaacttccccgccgatttcttaacaacagcttcgtaaaccctaaagccatcctccatcaactcctttgcccaatcagcacgttcagcccccagctgtccaacccgcttgagaatcctcaagttcgtaacaggttgtatatcgcaggagataatgtccgccaacgtgcgcactgccgcgcgggtctctggatccgaggctggggggagcaaggcgggcccttgctctgggaaggcttcctcgaggtactcaagtgcagccagagattgcgtgattgtaattggcgcttttgagtcgtgctggattactagggctggcactgttcctgaggggttgatggccagatgggctggggaggattgctcgccctttaggagattcacgtagacgggcgtgaaaggaacttgcttcaagtacagggctatccggagcctggcagagcaggaggagcggaaataggtgtggagagtgactgtgtcggtcattgtggctgaagggttggtgatattcgaactatgagatattggagtagcgataaaggtacgaaaagagcctcgggagaaggccttatgtgcttataagccaagctactcaattttaactacctgggtgtcaagtcactttccccaagacgcggatcttgtgtgccgttaccttgtccaggtggactcccttgaacatgtagggtatttggtgcggaacatattccgtcattttgaagccgagctcaagcgctgtattttatacatttcggctatgcctccgggagatatccagggtacatcatacttataatgcacatggtacttctaaatcgtattagaaccccgcgggcttgcagctttgatattctgcatggcatatatctgcgatttcttcccattattggctcttgaccgtccagcacggggcaacatcaccaatcaacttcaggataaaggacaatatgattttatccataaagtctgtccaatagacaacacactatttgtctatgttgtacggagtagattaattatcacctctagttagtgtgaaaggtccgatcctaatatggacagctatgtgcgggccggccgacggatatcgccggctaataatcctggcccaaccgcatcactttgtctccttgcagttatccatagcatcaccaaatacccacagaatccacttcagcaccgagaccctggttaatccgcccaggaacggttgacgatggatggtgtcaggtcagcccgcccggacaagccgtatcaacgcacctacaaggcgtgtatcccttgccggcaacggaaggccaaatgcgacctaggaactgacccaggtggtcttccgatcggcccaccatgtgcgcgctgcagaagggaactaagggagtgtgtgttccccgagaaacgggcgtgggaaagatcccgcaaacgaggtgcgctagaattaaatgcttaccatatataaattggctggtttctgaatggtcaatctctagcgcgatcaccagagagctatgaaactgatgtatcaccccgacacgccacgcaacttacgaagtcgcccgatagttctatccccgtacaaggacggacacagaacctgcaccatacaagcgacgtagctaacttaacgcccgagacaaactttcagaagccgcctggctttcagtcgggatggccatatcatcggggtcaagcggggtctcatcatggctctctcgatcacccttccgtagggccttcaaggactgaccagtccccttctcatacatatgaaaataacacgcaccgggcgaattccaccctcgcgagctctatgatgcgcactgtcgttacaagtggaaatgatgcactcaatattctcttcgaggctgcaactgctcaagaagatcatagtcctgatactgggtccgaatcactagccgggcctccatcggcaggtccgagtacccaaggtcgaacacccggaaactacgattccgcgtttgagtcggtggcccgaataatacgtcccgtcaagctatcagacgcaacacaagacactctcaatgtctgggaggcttgtcggtttgtcaagatgggctggttcactgctagagaggctgttacttttgttgatctgttagttctctcgcaagctccatgtctctgcgaaataacagctaacccgatataggttctataagaatatgtcatgtttgtctccgattctaactgatttttacgccaaccatcgatatcattactggctgattagtcgggagccagtgctatgctccaccattctcatgatctcttctcgctaccacgtccttcctggagcagggggagagtcaagaaatttctttatccatcaccgcctatggtcacattgccagaaattgacgatgcggctaatattcgggcaagagaagtcaacaaaatccaaagtgcgaagtcttggtactgtggaggcacttctgttgatgtcagaatggcatcctcgcgccctgcattttccgcccgagacggatggctgggacgatgatttgatccccgaagcccccaggacccatgacaataacgattcaaatccagcacctggcaatcgcggggtggaagacataattgagccagcacgccgatctgaccaaatgtcctggatgttgcttgggtgtgcgctctccctcggacacgagctgggcatattcgagccagaaggaagcatcccaccagccaacgaaccggaatggaaagatcagatggcaattcgttggcagcgcgtgcaacgtctgctatacgtctacattaatcaattggcttggcggatcggatgcatgtcaccgattcctcaatcattaacccatgctatactgggcgggcggaagccgcaaggattgagtccgccgggcagcacatggttgacgttcatggattcgtggattgagcttaccaagctagcaaagtctgtcactgatatgttcttcccctctgccgcttttgcacgccagcaactgcacagcggccgatacgttggtcttcttgaacatttccgacctctcctcaaccagtggaaagacaagtacctgcagcctcaggtgcttgataaagcattctacaacgatctattcatcgaataccatttcgtccgcgtctacacccattcagtgggaatgcaagcagtagttgagcgtgctgtcgcagagaacgaccccaacaattttgacggagtgcgacccatgaccatcgactcaacagactacgaatacatccaagaggtgattgatggatgtggccagatcctgcaaaaagtcacccatttggccgaggcaggggcgctacggttctctccagttcgaattgttcttcgcataactagtgcttcgatattcctgatgaaagcgctcagtctgggcacacggcaggccaagctccaggaatcaattgaaatattagaaaagagcatcaaagcactcaagtcgaatgctttagatgatgtgcatctgagcacgcgatatgccgcgctgctagacatgcacgtatcgcgcttgcgacggaatctgctcgcatcgtcgaaagtcgcgaaaggtcgagacgctccgcgaagttcacccatggggccccctccttggccggaaactggtgaccggtcaaatcccataaacacccctgtattgcagggctcaccaccggatatgggatttatcccgtccttgaatgatattggtgcagataactggctttcgttgccattcgacccatcgatggcgccgtttgatatgacccatggatgtcaatttccgatgtatgaaggtggagcattagactttatctggaatttgccatcttgatagagtccgctctgtacacagagtattcaattagatagctttgtaaatagctctgtatggtcgcaatcacgcgatgttgataatgataccccagttcggacaatgttactccgctttatatttccccgcaccaaacacaaccaacgtcagaatttcaaccagcgtaattacccagcaagatgtcgaaaccagcgtcatttaaacctacccttatcatccacggcggcgccggaaatatccaacgctccaaactccccccagacctctacgccgcccaccacgcatcgctccaatcctatctccgctctacacacaccctcctcaaaaatggcagcacagctctggatgctgccgtccacgccgtctcgctcctcgaagacgaccctctcttcaactgcggccgcggcagcgtcttcacaacagccggcacaatcgaaatggaagcctcagtaatggtgacatccgtgcaccaatacgacgtaacacaaccaggcgcaatcaagcgcggcgcgggcgtgatgggtgtccgtaatgtgcgtcatccaatccgcctggcgcgcgaatcgcttctcagatcgggtgtcgccgctgatgggtctcctgtaaatgatggagggagtatgcattctcagctggttggtccctatgttgagactcttgctcgggattgggggctggacttttgtcccgatgagtggttctttacgcagaagcgatgggatgagcatatgaggggattgaagggggaggaggagcctgtttcgctgactcaggggactgtgggttgtgtctgtcttgatcagtgggggaatctggctgttgccactagtaccggtggtttgacgaacaagttacccgggagaattggcgatacgcctacattgggggctgggttctgggctgaggcttgggatgagctcgtctcaggtgttggtgaggcagtattggaagattcttcggtgggtggcttgctacgtgaagcgaggaattggctcggtgattgcatgccaccgttcttacgaaatcagactttacctatttattcgtctctctcgggtgatgatgcctctcagctggacttggggcctgagaaggcatgtcgtccctatcaatcatctgctcagtcctctcgtcgacgggccattgcgctttctgggactggaaatggagactcgttccttcgggttgctgctgcgcgtacggctgctgcaatgctacggttctcttcgcccggtagcttcccttctggccttgcagatactgtgacggctgtttctgggcctggtggtgaacttcaacgttccgctggttccaggtggaagaagactggcgagggcgaaggaggtattataggtatagaggcagagcttgcccctgtaaatagggcatcggatgccaaactacatcggggtaaggttgtatttgacttcaattgtggtggtatgtggcgtgcttgggtagaggaagatgcttctggcaacgacgtcgagaggattatggtcttccgagagcaatatcaatagaagagcttgagttcattggtactttatatgtcaagaatataccatctagatttgttccctactgttcctacgagtatatttgaaaggtacaaaaatgctatgcaataccaaaaggtcttttgtcaggaccacacctatttcctatgccaggaagtattccggtgtgaaagtatcggcggacatttttggctatacatgtcgaaccgggcgaataggtacagtgctatgacatatagcctcagtaaaagtaaaagtacaggaggaaaagagacgctcgaagcaatgtacttacacccgcagaatcttgttcgaggacaacggagccggagaacttggctgccattttgtacgcgccaaatatgagcagttagacattgacctagaattattcagggcgcatacttcctaagtggagtagctggatccaaggtattttcaatccatagaatagggtgggccgggctcccgctaataggtcctagaaatggtcagatagatatcgggagaaaaaattgaaaatacccaataccctcgtatctccatttcggtcgagttttctatccccagcaaggtattggaaaagaggcccagatgtcggccatccatctgctctggctcttcaagacttggtaatagttttgttgagcgacgcgagagtcttatcaagagtgtccctcgttctttcgacggtgttgccagctgcaaatgagcatttctcgggcccagcctgatagcagatttcaaagaattcctcgatgatcttatcggtgtccacaacattcgcggtccagtaaccagagtacatactctgcgaatcacatacgcttaacacgatgagggtacatagctgcaaaggtcgcccccaagaccgtaccgtaggaaaatccccagtactgcagaagctctgcgccttgtttccatcgggttgccttgtgaattgcctgcctctggacctcgggaagggtcaacttgctggcaataatggcattggccatgttttctcgccattctccaggtcgctcgataatcgcaacgatatctgtcactgttggtgtagtattcatgaatcgccccatctttgggccgtctttgcgtgtacatgtggcgcctaacgccatggctcttccccaggcttgttctgttgccacggtcgagctgcctaacagatcgagaaattcattgtctagagatcatcgctgacgagaatgtggatctgtaaagcactcgtatcgtggagtagtactgttaatgccacggagatcaaatccgataatgtcatagtacttgtcttctgctgtctagggagccttggaaacttcccgtaagtttatgtctttacatggtaatttacctaggaattggaacagaatcgtactcactttaacagataaagacgtagcttgagagtcaactattttctggaggtgtttcccttgtgtcaggatcatattgacgcccgattcacccggccctcctaaaattaattagcttaatatttgtaggaattctctgtcgaacttgcctgggttgaccagaatagctcctccatatctggggtctgttactgatactacagcagggagtttgattattgcaagagcaaccttctcttcgccattatttgtgctgttccaatccatcggtacctagagacgggcgcattggtagctatcgaagcacggagtatatgagagtttttccgacggaatgatctagtgataatgtgatgagcaataatttgttaatatgaagacgaagaagtcataccaatctccaagaagacactcggtatccatcgtccacgagaccgtctgaatgtggagcaaccgcccgataaaacatgcgagtaacgaaagtaaactaaaagaacagcccaggagaatcaatagccattttgtccgacttcgaggataaatgagatgttgtggtcggaaatcgttggatttttgtttccccatatttgcagactcccgtatgtaattgggactggttgaggttatttgaacccgtggaaccccgtggggcgatgttgcggctccacatgttttggcatataccacgtgaccaagcacctgactgctgcttcaggtatcaactcgggcttctagtcgtgatttaagatgcatatttgtactctcttgatatgtatgttagatataacagtccacataaatacagattcgggctaattatatacaaaagcactctgttagctcgccttgagcgatgtaaagacgaaaccactcagaataccagcgatatatactgcaagaatcacaaagctaacaagcacatcggattcagatctaccatccctccaaaggtgtaagcaaagcaagcaccccatctttaggggaaacagtggcgctttctcgaatctccaatttagcatcaggatacttgagctccatgtggaaccgaccgacgacagcagcaatcaagcaagccagctcggacttcgcaaagccctgcccaatgcaactccgtggcccatgcaggaaagtcaaaaaggcataattactgaccgcgccgccggtattagccttaccgggacccataaagcggtctgggttgaattcattcgcatctggtccccacagctcttccatccggttcaggatttgcggagcaatgatcaataccgtatccttgggaatgtgcgtgtcggcaagagttgtgtcacggactgccttgcgtatggttaacggaacagaggggtggaagcggagaacctcgttgcacactgcgtttaggtagggcaggttatcaaccgcggctgcagagattggagttgggtcgccgagggaaggaagattggcgcggatttcatctcgcagacgtgtttggacgttggggttcttgcagagtgcgtagacggcccactgtagcgctgtggcagttgtctcgtggcctgcacctaagaaggtcatggattggtggacaaggttttcttcgtcaaaggtgccgctacttagtgcgacggagataatgtcaatgccggtttcggctttggggtcttccatctttgccttcttctgtcggatcatctgacgtgcgacgttgcggatgatctcgccactctgcttgatatccttgttgcgtttcgtcggtaatgagtgggcccacgatggattaccgaatagcacacatgttacaaaaatgattttcataatgagcggtggcgaggacatgattttgcggtaggattggttgagggtgttctcaggatcacgaagagagtcgaaatcatggtccataccggcgacgccgatgatgtccagggttgctctactggcccagttactgatttggacagttttgtcgttattgccatcggcctttctgctccgaaggtcatcctcaatcatcttcaccatttctacactcttggcccagaagactgggtagaggttcttgatgtggcgataggcaaaggctggcataagattcttgcgttgcgtctagtacattgtaagtttgagtccatggaagtgggatttcgggggccagatttaccttgtgctcttcaccttcagcaagtagaattccatcacctgtgatacgccgcaagctctgccgaaccaactctggtttttcaaagtcgtaaactttcgtgacaagaagctcgcccaatgattttgggcttgtcaaaatcactctttcgacatttccgacaatatagtaccgcaagagatcttgattgggtctgcttttggcccactcccgtagctgcggaaatggggtctcaagcaagaaacttggagaattgccggtgagccaacttcgaccctagatagcattagacaaattgacaataccatatgaaaaagggctggcctaccgcaggtgagtaaatgtgtttcaatggagtgaagtagtcaggatataagacaagccgataaacaatcctgaacatagtaataagcccgaaaatgacagcgaccgtcacaaccctggaattgaagatagcatactccggtttgaagtagatcccggcggcgaggccaagatagagaatggggaggctatcgctgacgcgctccattgctagatttttcggaggacccgggataaacaaatattgtaacttgacggctcaaatcacatatatagagagtaatagatgatatcttactggatatccaacactgcctcggttttgattaggtgtccagcagccagtgaagagccccgtgtggggtgtagacgagatgacaaaatgcttggctctcgttggttccggtcagatctgaatcctacacggagtacagtcttatagatagcaacgaacgcgcgtagatgacctctgcacagctgaaatgagtttgattcgagaaattccaggagagatgacagagtatggctttgagatggttgcctggagtgggacatacgagaaacacgggaacagatagaacctaaacgaaaacgacagcaattactacttgggtatgttatagctcaaaaatagaaagagaaaccgatgatataccgactatacaaatatcatatgtaccggataatgcctggaacttgaaccctttccctttccgatttagtgcttacctcttaccgctttttgatcactgaggaaaacggagcacatctctgagtaacgtaattcccagccgagctgcgcaccctaaccaacccattgaattttgacggaaaaacggtggtaaggcgagtgtatttgtggcagaaaaatctcaataaattctctaactctctaaaactgacaatagtcctaaaacatgacaatctgatggacaacttagtaatcaaaacaaacaaaacaaaatgaaaggatatttttcgggcgaaaaaccttctgagttggtttttctgcagaaaaaccagtctggtcagtcacgtgacccaactgtatcagggataaaaaatgatagtatttatcctagattctgacataccccccagcttttaaagtgattataaatcagggctttaagagctgttataaataacaaaattttccttaatatctgcttttataactgattagataactaatcttagatattctaagtaattccctaaactgttcttgtttctagtagggtaaagcttttgttaggctattagtaggcatttctacagttagaatctaatctatattaacctatctagcgttaacttcctgttttaactagtatattaatatctatatagcggagctttatatatattaacactctttcctttattaatagattaatagtctagagtcaggggagacctaagtctgccattgctaaaaagactcgctgaggctgggtgaaaaatcggccctatttcttctagaaagttcactgctttcgtcacactacattttgaactataaggaatggcggaagttctatatcatctatccagaaaggaacaagagcgattggattaggaataaaagtaagagaagtaaacgccgtatccaccgttcaaagaggaaaaagggactgtttagccatagcaatttgcgcctccatgcgtaaatcatcaagtgagaatgaaaaaatatcaagtggtggacgtcccggtaaaagagcgtttccgaacaacattttccgtgtgactttaatgggtggttgaggagaggaaggtaccgggaaaatggcttcatcctgttctttgagtggattaccgttgttgtccagtcgccaaagttcaatcgtaccagcaacaccggctcgtctcttgaaccacttaatcaatatcacagcagtaatttcaccctggcctccgatcagtaatcttcgcatgtcactttcaagaaggggttttgattcgctatatccgatttcgaagcagagcgtgggaagattgagaccatggacgttcacatgtacatcaggttctttccgacaattagcgtagacgccccgtgtgagtgtgatcgtatccgcgacttgggctttcatcattctcttctcggctgtcgtcagaagcccggcttctatccacttgtctcgtgcgtcttggaaccagattagggcacaattatgtagcggtgtaggtattttgatcataaaggttccagtattaggatcaaaggactttcggagtgcccgtgattcgagttgttcaaatttctgccatagttgtgtaccgacatgtggctttagctgggtaatgacgagtagatcaggggtattgattcgttcgcgttggatgaggctttggatggttgaatagacacgcacagcagttgggatgttcgctgcagagacttggatggggcgtaaagacttgttaatttcatcgtgatcagcttcagggagatgggaagtgggggaaccaggttgttgaggcgatgaagttggacacgaaaagcacgacatggtgaagacaggtgggaaggaggcaacgaaaatcgtgaaacgtcgaggttgtagcttcgggaaggatcgttgagaagttgtaggtaactagaaggaaggagcgttggcaacattgacgtcatgcttatgtaaggtaccctaaggcgggagcttacagaactaaaacaagagactacgatgaggcaaaaagaagcgaaagaacactgaaagtaaacgctcttgatgctgctgaaactgaagaggagaaaacaagaatccaagaaaactggatttttgacgacttttgcgaggaagaatatacgtaaaaaaaggctttgccgctgttcatgtcgacagtggacagaaatgaggtcacaagaatatcaggggtcattgtggtaacgaacacatgcacgtgcgatgcaagagcttcttggattacatcagtacaccaatggcattccttatatctagtagcacaatgccttcccgtcatgacgaagcatcggtagatttaagcgaaataggaagatagccgtctagccaatctcagagatcattatggttacgaccacagtcaacacgtataaaataacagaattcccgagctacatcagcaaaccgatggcatttccttttggtctttcgctaaagatagtcgttggttcttcagtgtcgtgctccagtatacctgtatagagccttgagtcctcccgggaaacttttgaacaaaacgcttggtcacttctgaccaggctagtttctgttcttccctgagcttcaccagtagacgatcctcttccacagaccatgaaaggccttttctcgagggacgcgtatactcagaagtatccgttttgccgctcgtgcttgagttattaaatgtaggcgctacgtctttttcatgtttcgaaatgtagcttgacacagacgtgtcctttccgctcggcacgggagcgcaatgcgacaagacaatcttaaacagtcaggacaggaactgtagtctgtcatcggctgagagggcagagaattgagcacgaacagtggaaaatgaaacgtttttacggccgagcccttaagcgaatcgactagtctgatgcttggtatgaatttccacgacgactgcaactttgttgattctagaaggctgcctgccaggtttcaccgtcctcttcgagctctgttgtctatcattagaacaggcttccttatccaataatcgagatttactagctgatggcctatctggacggactctaacgcgaggcgcaggctctaccgcttaggtctcctttaatacccgggaagtgatactcatctaggattgccgggtcgattgatatatcgtctgaaagatctccaggctggataggactattaggagacccaacttgatagtactgaccagcagagaaagcgaggtccagctcgcctgattcaaagctggggagttggtacttagaatcatgataaatattatggaaaatcggtatgcgattaacgttcccagagcttagtagatcttgtatatatagaatttcttcgaagtcgaacgtctcaatgtctggattggtggatgacggggttttgtcataaaagcggcggcagctcaaataggaaagcccacccgccagagaaaatccggtacgtatagagacacatatataacccgggaacccatgtcgagctgtatatgacattcacatggtctggcattgattacgtcatcagatcggctggcacccaatgtccgtcaacatcattcacactcttaaggactgttaggactagctactagcatatcctgaaatggaggtttcgaactagagtgggggttcccaagatggctcatgcaattcagtagactaatcgctaaggttctaatcctctgtgcgcggcgtgtgtgtacccctggcgcttacttagcgagtacgtcgagccatacgggccagttgtgcaggtgaccctcggggtcgtaacaaggacataatggactcttcgccagatagcgaccctgtcgagacagagataattgaatctttcacacccgattttgatattgtggatccatggttttgactcagtcaacctcaccagaagactagccttcctccatacgcacgatcaataaaaatcattgtcgcgacacagcgtcttagtgataaatattaccagagttggcatctactcaaggacatggggtcaccggaagaaagtgccaggttaaagacatggaaagctttgaggattggaccttgatcctatcgaaaatattggacaatgtcgatgtgatgtcaatacacagatgcccgtcacatattcgaagttataagtcgcataccctgccaacctaacaaaggcgatattattataggacgaagaatgggaatatattattaaatcgaaactcaaaacatcaccaaaaagcaaattctcactcagacgtccttcgaccctatgattctatcaaattcaccaaccgtatgctgccaaaccttctgcgccatcccctccgcgcgaagtccagccaacaacttcacaaccttaggaccagcgtgctctccattccagtgaatagtgtaaacaccactcccaaccttcccatccgtcccactggcaacctcaacctcctccgacaagggcacaccagcggaattccccgcggcatccaagcagacacggggaggatatttagcactcgtcgcaaagaaaagatgtctctccccggactcccgaatcgggatgtaaaccaaaggcccgataaccatgagcacgacattcataagccaggtcagaaaagtattggactcgcgcccaatgcccgtcttgactgcgccagggtaatcgataataaatgacacttctggcgcttgctcggccagtgtttccaaaaccatatcagtcatggacaccacatgtccacgtagcttcagcattgacatcgtccttccttggaagtcagtcacgtcgatgggaccttcatggccgccggcgagaacgctgaccacgcgccgtaggcccgttgcttgtttgagattggggaggaggttgatgatgaatcgtgttcgagcgtagtatgcagctgcacccaagatgtggaggccttcggatgtatctgtttgcatattatgagcaataatgtctttttttatttttattttcttgtaagggatgtggggatgtcctgcctaccttctccggaacgaatagttccacagctgaggaagaggatgttgatactcttttctttgttttgaagctcgcgacagaccttgtcgacgttccgaatcaaactgacgtccgctttgatgaaggtaaattctccctccgggttcagctgtcggcattcggctgtgatgcgggctgcggcttcttgcgaccggccgatgaagtatgcgcggggcgatcgtgctgagcgggcgaactcttttaaggctgcttcgccgatgccgcttgttgcgcctacgaagactgccacgaggcctgctgggagtgtgtcggcgatgtgggcatttgaggactggacgtctggtagagagaccattttggatgctgtgaactgacacaggaaattctagcttctatcgattatggaggttaaacgagggtatgatccatgtatttatactccgtatgtagagatatttctcgtattgcgctgtgttctatattcggtacatctataggccgtctcggtcggaggacggacttagccacacgaggcggaggaatgaaatcccccgggaatttatccttatgagaataaagtttcgtttacttgtcgtattcaattaaaacgtgaagatataattaagagatttattatcagaatatacaggaatagttggtcgcttatttggcctagacatgtatttttttaggtacatcactcgcaacatattgcggaataggagcgactgaaaatcatttcaaaaaaaactcatagattattttggatcttaccatattcagataaagcccacttcaccatccattctgactcgagaatttacttggtggtaggacgatcctcgggtctgaataagagcatctgtcgtaacatgtcgaagagagcgtctctttcccttgcatcaaacgataggatccccttctctcgcctaggcttttcaacgctatcctcaaaccgatcgtcgcaagatcggaaatatatacggtttattggcttaccatcctcggtaaatttatgctgtcgcgcctcccaccttctccaccattcaggcggcaaaacaccaagagtatccacatgttcacaggtcatgtcgtcctctgtcgcgagaaattcttcaaataatggccgttgagcgatgatagaccatatggtacaggcaagagtccaaatgtccgatgaaaaagaaagaggcttatttggttcaaaacgagcctcggggggccggatacctcggagggtgcgagattcgtatttcagttcttttgagggcgaaaaggcttcaccaaagtctgtaagtaggactcgagcttctgcaagcgtggtttcctcacttgcttcacctagccatatgggcataatgccatgggatgggacaccaggaggcagcgatttgctatctagatggacaaccgggtccagctgcggtactccgtatttctcatataattgttcgagtgagagttggtcgaaactgggcgcaacttttagaagaatgttgccgaggtgaaggtctccatggacgattccttggccatgcacataatctataacgagaacgagttgtgcagccaatgaccgggctacatcaggctggaacacgcggatccacgaaccatctttcagcccggagaggctggccctcgccgtcgctgtaacgtagcaaacgtgattgccatttgggccgcgaatggtaaaactatctagaatcgaagggaccatcgcctttcctggattgttgactagagaacaatgaggacgagtgagagtgcataagatatccacctcctttgggttcgagtctgctatgaaaacttttaccgcaacgtatttattggattgttcatcacggccgagccacgtagtcgaataagacccatatcctagcttatgaaccactcgatatcgactgtgaaagtgttctccgattttcattgggtggtagccccctggtcgataattctctattctttcgactccctcgagaggctcgtagaggaaataggcggtagaatcatcatcagtctctattgacttgaatgcggtgagagtgaacgcgcagcgtggttgattttgacgcagcagtggcatgagcacctgccggcggataggagaatctcggtaacgtaaaccattcgggcgtaacaatagaatggacaatgacaacagtttactcatggtatatgtgtacaggttgagctgaaagaactttaaagaaggagatagaatgctgattaaatgtaacggaacagcattgatggttgggagaaagggggagcttgggctggggtgaccgcccgcgggtttttctcgatcttcggtatcagacatgccagtgtcaagtatattcgatggaatgcgaaagcagaagcaactggaatagattaggcagactgaattgattcaatgccttggcactgttgtataggaagtgcttgtccagtcttggcgttaacaagctcacagggtcaggtgatgttgcctaaaatacagtgagaatgagattcgagacagccctcgagtatatcagaagatccttctcaacggaagcgccctgagaagttaggattgcatcatccaactgtgtagcgcccggagacagagcttatgcacatggaccctcccctggcgcgtgctgatggccagtgagcagtcagaatagagtgctgaaggatccatcttcccgtctgtctcagggtgttgaagtgggccagtggcagaatgttgttgtccctccaagaatagacatatgcaaattaaaaccttgatggatgcatgcaaagatgttcccaatttagaacatccaaaacagaccgaacaaagagatgaatggacgaagagaaagctccctcagccttaaaaacacccgctcgtgcctgtcccgcgtccccacccctgccgaactcctcttctcccctcaatgtgtttcacttcttcttcccctttttcaatttccattccaacgtcactcatttcccagccaacttccttggaaagttactacactcattcaaccctatttctatcggtaatcgcgcattctttctccatataattgtggcccttttcttggtatatcggcggtcaatgaaagcctgtctattgtcgctttcaataccccaatgcgcgtttgaaacaccagcgcttcattgtgatcatatacacgtggcttgcagccctcgatacctgatatcgtgatcaacctctctccttgcattccgcaggtatgcgccactcgcgcggttaatatactatcattcccctcgttgcgcctgaattttggctctctctactctttacacctgcttcaaactcaattacgactttgcccggctggcccgaggaagtcgacctttgatcgtccgtgatccgccattctctacaatcctcagtgatcacttcgtgatcactccctggcaggaccaggtcaattcacacaatgctgtgcggtggagaccgtgagaagggggatgtggcgatggaggagaaatgggactatgtggtatgtccgccccaatgacagtgttgtatagataactcggcatactgataatgactcccttagaacttggatgacttcaaatctgagtcttgctggacccccttctcctattttttcatatggttgttcctatttatctcgattgcagtctacggtgttgatacattcactgcagtcaacttgctggctttctctcgatggtccggcagagttcaacccgccattcccttcaatatctcccggtggatcttcgccgcctgcatcattgcttctttcattcttttggcctacagatggatacatgcaatccgctccatccgctcgggtagtattactcgcagctttctggacccgttggctgtgcgtatccaaagtattcgcctgggcaagcgcggtcgtggatacaggagattccttgtcttcgctgaattaacgaaagacaggaaagcagcagaatatgttgctctgtatgcgtacttctctttccagtgtaagcatactaccattgactaactgatcctcgaatataactaacggggcttttagtctggatgaacacgatcttcgcagatggcccgcgtcaagttctcaatgccatcactctctattcggtcatgcaaatggacctcattcccgggggcaagaatgcagcccacgacgatggaacttcctcagttggtcaattcttcaacaacgtcaagattttggccgaggacaacaaccttcaagccgtggtcttgtttggtatgcttttcaccctggtcgtttgggtcctatcggttctgaagttgatatcggccatcgtactttatttaatcttcctcttccaccatatcccagcggaagatggttctctttcgaagtactgccgtcggaaggtcggtcaacgtctgaagcgtatcgtgcaccgcaagaacacaaaggccctggcgaagggactcaaattacagaatcgagcacccactcagccaatgctggccatggattcgaacccgaccctgccgtctttggccgaagataagcaccccacagtggcttcttcgttgtcgcgaagtaccactcagaccaccttgccgccttactcgcgatcggcttcgatagcgccgacggccaacccgacactgccgaatctggaattagatgccaaaccgacactaactcgaactggaacttcatcttcagcaatgtccgagtccgcttcactgacaagcaatgcggccggaatgggatacagtcctcttgatggccggaggccgacgcttcccccagtacctcccttgccctcaaacgttccatcacggatggccactcctcactcccgaggaactcctgcgccatatgagaatgatggtcgtaatagccccggtcctggatatcgcaacttgactgatagctctgattctcggtcatatcagagtcacactccagcgcctgattatgcttcggctgaaatggacccttccgattaccacgattatttcaaccgtgacgatgcgccggctcactacgatccctacgggcctccaaggggtacatccagggaagccgacggttatggaggaagatacgggactcctagtgaccagagaggcgcgcctcgcgcacagcaggattactacccacaggatccatattcgaacaggtcctacacaccggctagcactggtgggacgcctgctccctatcggtcctacacaccggcaagcactggtgggacgcctgctccctatcggtcctacacaccggccagcactggcgggacccctgctccctatcggtccaacaccccggcaagccatcgacccacacctcccccacaagccgcattggcacagcctccaccaaggacgttcactccggtgagttcggcaactcccgctcctcaaaatggtggctatgcagctttcaacccgtcaatggttcaccaaacatctcagcctcgctctaatgggcctcccggtccgggcagctttactcgagcaaacaccgcttcgccctcggccatgcatcgtgctcccccagggcacacattcactcgctcaaatacccatcaatattgatgaggttcaccctgtaggcctcatttgaacgccatgagactttcctatgatgaaaaccaggagctggctctcctgtggttgatgaccggatcactcgctaatactgatcacgaccagcgagcctctctagattctgtacatacccctattctcctgactgtgatatccttaaattcttattccccatgacatgaattgatctctttttgtttccgaattcactacagagaatgtatagataacatgtagcttcgaagtaccattggaatcttgatatttccttctattgcgcgattccatgactcaatatcaatcagaaacaggatgatttattatacacctatacataaattacctatacaatcaacacctccccacgatccacaacaaacagcacccaatcaccaaatcttcttagcgatcatctcataccgctgtacatgatcaacactaaactccccatccttactcttatccttttcctccttctccttcaaccgccgcaatccatccggatcatccgcatagatcaacttccgcttctcatccccaacctccacaacaccccacccaccaacgcgctgactaccctcaacatggaaatcgcgcgaacgaggtgccccactctcagtaccagactggttattcgaggactgtttgcgctcgctctcccgacccttcatcttcctataacgggagcgcgcaaaggcgagcaggaccatgcccagcagcaatttcaggatgagcaggacgataaacccagtcaataacaagatgccagtgaagatatggacggactgggctggggacgggatggcgttttcgaggagggtacggaagaacgcgctgacgtgggcggcggaggcggggatgagggttgctaaggtcaagggcggggccgacgggatcggagagggaacgtagtggttgtggattgatgctagggaggttgctcccattgctgttgaggaggggttttgggggagtagggcggctaggaacatttggtaggtttgcacggagacccggaagaagaggcaggagagagggatgactgggaggccgatgcggcgggttaggttctgttcgccgaaggcgttggtgtaatagtccttggctagcacgtcgaggaagcggccgtagatggctgggcggttgttgttgaatttgttgatataggcgtgcttgagccagtctactagcatctcggagcctagtacaactagaaatggacctaggacttgggctaaggtcgggatgaaagaattgacgctgtggaaggatgatagaattgaggatgggaagagggtaaatgcttggggcaggatggatgatgcagtgcgtggaggggtggatagtggtgtgctgttcgtgattgtggaggactggcccgggaagctagatcctagcccgaggttgccgatgaaattgaatgcacctgtctccacgatattacgcgaagctatgatagtaagcatcagccatagctggaaccgttccacaacgtccgcacaggtaagttggaagaggttctctttctcaaacttgcggaagacggtagatttaatctccacaaattggtttgatagaagtagcgtaatcaatgcgttggagtatgaattcactgccacattcaaggtcatgacctggtagaacagagacaatgcatgagatactgtgtaaaccagtgccactaggaacagccagaatggacgaatgatcttgcttcggccgtccggacgacgctcaagagcctccctcgagaagagacactcgaggacatcttgacctatggcagctaatagcctgtcactgacctccagcacattgtagataacatatagcttgatagcagcctgtccgcgaatccagtgatacattcgactcgcatcgaagtacatcaaaacacagcaggtagctatcatcagcaggcctgtcagaatgtccgctttgtcgtctggaaggagcgccgagggcatcgacttcttccgtcgatggtgatacttgcgggattcggaggttcggtgtttccttcttggtgtttccgactgtgactgtctggagtctctatctgctggtactgtgtctggtcctgcagacgagcccgaaggaagatgaggggtggcgtcagattcgctttcgggtcttccacgctgatggtcttccttcgcattatgatttctcctgcgccatactcgaccaatcccattcagcacaaatttccaaatgaaccgaatctcagctcccaagttcatcacccatgattcgcccaatatatagacagctttgataaaccgcagtggcattatcgtgaaagagtaaagccatgcatcgaggcaagcaagactcccgaagcaaagcacctgctcaagcataggtgcaagcataatgaaattcataagcctctcaatcttcactcgtgatgattcatatgggaagtcattggccgcatcacggtggatgtacagcggtgaaggtcgaccagaagcaagctcaagctgaagataggttggcagagaaactggcggcaaaggaatagatgatggcgagggtgagggcttgggcgattctacaatctgaggtgatgcaacaaggtgactcttcaaatcgcgttctaacgcgggtcggtcctgtttcgggcgcaacgcccatgtctgggttaggcggtcattacttggggtaaggggcagttgacgccgcgtagagccaggggtggacaatgttcgtgctggctgcggccgattgcggagggatgaattttgaatattccgcgggaaggcaggactcgccggtgtagaagtatctcctggcaacacttctttagtgggccgcaactttgttaaaacatcagcgggtgaaggcctttcgcttagtgactgaagcgcaacctctggtatctccggtcgtgcgagaggagcatttccatggacgttgtccgagacaactcgccttccagggtttctttctagtcccatggggcggtaaggtattgactctggcgaggacgtgagctcctggatcttctcaggagataatttcatgaccttgtctttatcctctgatagtcggtgagacagatcattagacaattcagccaatgactcggctaatgtcgccttgaccttggggccatcgtacacatcaactaccgacaactggccaatattatccctggtgttcggtgaatgttcgaccaggatgccgagtccatgcgcggattctaaatcggctattttatatgctccgtttgtaaggtcccgttccgaggttgtatcgtgtgtctgttgctcatttgagccatcgtctccattgattgggcgttcgtcggcctcgccgttggactgcaccacagtatctactcgactgcatttctcctcaacagtatagggcaccaattgctgttgagacttcgagttcccactggctccgttttgaacagtattttcagccatcttccgcttgtgacgaaacctcactggtatctgcaacaggactaattttgacgacccagcaacccgcgagaagccaacgtgttccttaaaatacccacaagcttgcagtatcacctcttataccatcagaaagtgcaggggtctccgactcgcatcgtctaaattggctcgtgacgagtgatcaagctatgttcgaaggcgaagaggcgtaaaaagagatagaatcgcaaaaatggcgtagtttgttgcattaacaattttgttcaaccagctggcacatcctgaaattaaaaaaaaaaaaaacgacgcactgtctgagctgtttgcttgttgatgtcggcgttgtctgggggaagataaggatggcaggttatctggcaggtcggtgagtcggaggttagcgccatcggtgctcggacataaaaaagtaaagtaaagtcacgtgcgcctggaatagggagttttttacccctggaagggactacaacacaactcaaaaatgtctctattctcactgccaacggagcttttgctccttctaacgcataatctgcaatatgcatccgagctcagcgcgatgtcgcaaacctgtcgccggtttcataccatattcgatcctgagctttactcacgatttgcgaatagctgtgaattcaacattctgcgccttgtggaaactggcaattcagacgctatacaaaagctaggtctgctggttacaaattgtttgattttctagaaacaccggtggattggtggcagccatgtgacacgttcgaccttgaccgtaacttggaatctaagtcttccatgaccatcgcagcacggaatggtcatctgaagattcttcagctttttgttgaaaatctgccttcaatcattacaaattctgctcgatcttggtatcttctgatgcacgcggccctacgtggtcagttacatgtagtcaagttcctaattggtcagggtgtcccagtgatccatgttgacaagtcagcgcgtactagctcgattgttgatgctgcagttttaaagggccatttgccggtggttaaatatataatcgaggagattaaattcgcggatcgatcacacaattcggcagatcctcttctttgccttgccacacacgctggtcatttggatatggtcaaatatctggtcaaatgcggtgcttcctttacttgccaacacttctacccttttcgtggctcggccttcgacattgccatggacgagggctgggcagacatagcatcattcttcctaggcaatgcaactctagaagatctagatatcataactacaagcggctggaaatggatgtcgaaaccttgtagccaggataaattcggacatatattctacccatctccatggaaaaagccatccattgcccatatgatattggaccgagtcgatctggagaaacaactgacaacaattactccagataacgaacaagaagtgcgaggacgacagtttcattatcccaatggacgtccacggttggaccacatacatccacgctcatcaattcaattgctcgtcgagcatggcgcagaaatcaatcaagtggacgcaaatggccgaaccgctctgtttttaactatagaaagaaacaacctcgtcttgacaaaggaacttctcagactgggagccaaccccctgctcaaaacgtcggcaaatgtcagcgctctcgagctggccatttcaaagtgccaaacaaagcacgtgaaggcatttttgaaggctattgagattcattctttcacatgtgacaactttagtagcctcaatcctgacgttctgccaccggagaagctgccgaacagagctcctacatgtgcaagcgctcaatttcatatttttgcgaccgattttctttcggtagaaggaatcattgcaagaaatggatggatggatcaacctcggggatcacgagttccagtatggtgtcggaaatcgccgcagaactgggaggagattttggaggagagctctgaggaaagttcagaggaggactcggatgaaagctcgggtgaaggctcggatgaagaatgggataattattcggtgagtttgcagaaggagggtaccgaggaagataactttgtaccaatttggtctgcaaccaaggatgatgacagtattagcgatcctcgctgggcgcgattcttcatcgcaaaggccatgacctaacattactggcgaatgatgtacctagtactagtttagattggaactgaaaggccacggaagacatttataaataagagatctgatttgttaactagatacgaatgagtatgctcaggtgctagactaccacctaagaagccgtcctttctgttccatttgactgtgcaaaccaggactagggccttcacaaattgcgacacaaaaggattggccagttctaaaacaagtggaagcatctaatcgtgaaggcctatcattccagattcgcatctcaatcatgtctttcatgtggtattccataactcaatgcatatatgctaactatcatcggatgtacgtcaagtgacagggcaaaacaatgtatggctcaatcccaaagcctctagatctaccagtagccagggaaaagccagtccagcttctccttagcctcgggagtccagttagtctgaggggtgctaacaccgaacttaataccaccagccaggtgcttagcctggactagctcggcgtgctcgtcgctggccagggcatcaaggacagcagtcacgaagcgacgagcgttttcggcgttagacttcatgttgcccattaccatctcgacagtcacgtcagcggtagcctcgtgccagcagtcataatccgtggacatgcaaatcatctggtaggcaatctcggcctcgcgggccagcttggcctcaggtagagcggacatgttgatgacactgccaccccatgagcggtacatcttgctctcggcacgggtggagaactggggtccctctgtacgatggaaaagacatggttagtaatgttttgtcgtaaggataagtcacagcttcacatacccatacaaatcagagtaccgcgatcgtgcaggacgacaccgtcaccctcaaggctgtgtccgcactcgcgcaccaccttggcaacaccctcatcaaatgggtcaccgaaggggacgtgggcaacaatgcccccctcgaagaaagtccacgggcgcacgcccttggtgcgatcaatgacctggtcggggatgacaaagtcgcggggcttgatttcctcctgcagactgccaacggcggagaaagcgatcacgctgcggacaccgatggagcgcagggctgcgatattagcgcgagcgggaacctcatgaggagcaatctgatggtgcaagccgtggcggctcaagaaggcgacagcgacaaccttgttgttgtgcttacactcgtggtgcagaatagtgatcggcgaggaagggacgccccagggggttgtgacgttcagcgaggccacttgagtgaagccaggcaattcgcgcagaccggtgccgccaatgacagcgatggggacgggccctgtcagattcaatatcgtcagctttctatcgtagtgggggtatgaggggtagaagtgagggaggcagaagcacacgtaccgtcatatgtagtagggagagaagccattcttcgagcgagttgtttcgcggactcaattcgacggaatggtttcgatatagaagagaatgaacgtgagcctaagatccagcgcatcttgcgccatcttcaaatttctgaggctgcggccaacctgcgtttctccgattggttgtttgctgacccacgtgctgtgggttcctgaggccgccacctaccttttcgggacatctataaaactttaatatacatttacatcgacagtccctacgcaagtctccgtacacggagatatatatttgatggcgtatgggttgtatgaaaacttttgcggtaaaattgtacactctacatgtctatcagggtcacagttgaccattgatcgagaacatcttcaaaattatattctatgcagtcaaatacatgttcaatttgggataataaatacaacctagatgacaagagtctggggtaatgcacttgaattaatttaagccggcagccactcgtagtggtgagggcccttgtgaaccggtccaggatcctcaccgggaataccaggcttgttgtagctgtgtgcaccgaagtagtccatctgcgcctccatgaactgggtcggcagtcccaatccaccctcatacttgagatattccagagtagctgagagagccggaatatattgatcaaacatggttccctccatgacaacttgcttgagactatggaagttctggtgcaactcatgtgcaacagtatccacaaacttggcgtttgtcagctcattttgggctgcaagcggcggctgcagtagatccgcaatgtaatcagacttgatgatacatcccgctcgccagatctgcagacagtcgcccaaattgaccttccagccttcgtctatcgaggcccgggaaatcagctccagcccctgacagaaagatgccaggaacgagcagtacacagcttgtcgtaggttctcgataatcacattgtggtcccgggttccctctatcggtttcggcatgggcatctccagcttcttcgcaacacgcgctcgctccacgcgatttccacttgagattcgcaggtactgggcagccgctaacgtcggacaagagacatgccgggcggcagactccataacacaccagtgtggagtaccttcagtaccatcgtcgtcctgaaccaccttgtcgaggacatcatcgagcacatatccatcatcccgactggctccctcgcctttgtagtctcctttgggggttctccgtgtgtgtaaaatcttggcgccgatgttaatcaggaagttgccccgcagctcgccagtctcattccatttatcgaagacatctccgattgtgccatgctccatgccgagtccctcgtgcatgtattgccatgtttcagcaagtacagaaagcattccaccctcgatgccattatgaaccatcttgatgtagtgtcctgatccaccgggacccatgcgcttcacgcaggcagtcccagttttgggatcatgggccgcatacgactccaagaacggcataacacgctcgatggctttggcatctccacctggcgagagactgggtcctcgtcgtgcagattgatatccacccgagacgcccattccaatccaggcgacaccgatgtcagcacactctttctggcgccgctcggtattccggtagttctcatttccaccgtccaggatgatatcaccctctttcaggtctggtttcaacaagcgaagtacttcatccgcggggtcaccgtgcgtgatagaaaacatgaatagtttgtggtcggacttgccctctaggctcttggagaattggttgatgtcatagaagccttgaactcggcctgttatagctttgtcctctttggcgtagcgcaccacttcgtcgacgttcttctttattacatcccagacagagacttggagcccgagctcagcgaagcgaagggtcatcatagagcccatgtttccagctccgacgacgccgatgcttttgatggtggacattgtgaattggtcttgattctgtcaggctagctaagtgatgcaaagttcaagtgggaagtatgcgggaaatatttacaagaaaatgtctgggacgatcatcgctcttaaacaagaagattgtggcggtcggatctgtgatccgagcatagtcaatatggaatcagacacgccacgaacaagatttgtgtagaagaggcaagtgaggcgaaattaattgttgtagtgtctatcaaagactcacattatggccaagctcgatctgggctggtatgatacaccgatgacgacataagctctaaacaagaacagcccagttcaacattacatcacgatggacacagaatgaaaaaggaataggcgaaaaagaaaaggatgaggcaaatatatacccaatgataccaagcatggcaatctcccattcaagctcttccctcatacgtccagtgaactatacgtcttcgcagatatcaacaagcctcaacaaaatcacgatccactatacaatcttgtttgacagattttagagggaaaagaaacgaaaaatgtcaattccctactcaagtctccaaaaaatccccctctcatacgcttcctgctcaatcggctgcggcccgaaggacacccttccgcgccgcctcgaagcaatcagtgaagcaggcttcagcgcaatcgagctatccttcccagacatcttagacttcggcgcgctaaccactggccatcacatcgggccagaaaattacactgcaattttgcctgtggccgtggaaatccgtaaactatgtgaagaacgtgggttgaaaattatgatgctgcagccattctcaaacttcgaaggttgggtcaagggctctacggatcgtgaggatgcatttgctagagccacaggttggatggatattatggatgccgtgggtacagatttgttgcaggtatgatatggatatatatatgttgagcacgagcaataagctaatgacatatccaggtcggagcaacagacacaccagaacccttaatcacaacagaacgcgatgtcatcgtcgctgacttgcgttctttatgtgatattctcgcaaaacgcaagttccgcctcgcctacgagaactggtgctggtcgacccacgcgcccgggtggaaggaagtctgggagatagtgaaagcgatagatcgcccaaattgcgggttatgtttggacacattccagactgcgggcagtgaatggggcgatccgactacagagtctggtctgattgaatcggtcccgcagtccgagctacggaagcggttcgatgcgagtatggatgagctcgcaaggtctgtgcctagcgagaaaatctatctgcttcagatctcggatgcgtataagttgtcaccgccgttggagggaaagattgttggtggcctgagggctaggggtcggtggagtcatgattataggcctatgccatatgacggcgggtatttgcctattgaggatgttgcgagggcggtgctcaaaacgggcttccggggttggttctcggtggagatatttgatagtgggccaaagggaactgggaaggtgtatgatatggggtcctttgcagcgaaggcaatgggtagcgtgcagaagtttttgaagaattgtgcgacggattgagaaaagcaaatttcccacaaaatggtcataatgatatggggttttaagaagtctggttggtacatttggcatattgactatttagacttgaaataaatacacattttgaggactccttggaaggtcgtggacacgattgaaagaaaacgccggggtagaatgcaagattgacgccaatgagatcataaagcatgcaatataccttggaggtcatggataggataccattatccattagttggcattgctggggtacgcaacggtatatgttggaacgtactcctccttaatggaacgcaagctgacgaaacgggacattagattagcacttccggccttatcattggtaccgctagcacgtgcaccaccgaagggctgctggccgacaacggcaccggtgctcttgcagttgatatagaagttgccagcagcgttgcggagagcctcatcggcgacctggatagccgcacgatcctgggcaaagatagagccggtcagagcgtaggtgctagtactatcaatcttgtcacaaatcttggtgaagtcggcttcggtggcgtcgttgtaggagtgaatgacaaggatgggaccgaaaagctcgcgcgaaagcagagggtggtctgggttggaggtgcggtagactgtaggctggatgtaccatcccttggaagagtcgtaggttccaccaacgagcagctcaagttcggggtcattcttggcctcctcaataacaccggacagcttgttgaatgaggcctcatggatgacgggaccgcagaagttggtgaactcagatggctcgccaacgtgaatcttctgcacctcagcgacaacctgctgggcaaagtcctcagcaatcgacgaggcgatgtagacacgggatgtggcgctgcacttctggccctggaactcgaaagcaccgcgcacagtctggaccgcggcgttgcggacatctgcagacttgtgtaccaagtggaagttcttaccaccggtctcacccacaatgcgagggtagctgcggtatttaccatccgccacgccctgtgagatcttaccgtacagcatgcggaagacatcagtgctcccggtaaagtgaagagcggcgaaatcgcggctttcaaggacagtgctagtcacttctgcggcatcaccaggaacgaactggatgacgtccttgggtagaccggcctcaagtagaatctggtgtacgagccagttggaggcaattgcggagggcgagggcttccagatcacgacgttacccatcagagcgggtgcaccagccaagttaccgccgattgctgtgaagttgaagggactgatcgcgtacacgaaaccctcgagaggacggtactcaagacggttccacacaccagcggagttgtgactaggctgttgcgcgtaaagctcttcggcatacttcacaccgaatcggaagaagtcgcagagctcagcggcggaatcaatctctgcttgccatgcattcttgccctgtccgtgcatagtcaaggccataatatcgtagcggtacttggtcgcaataagatcagcggccttgaggaaaatgctagctcgctcggcgaaaggagtttcagcccaggacttgcgagcggcgagagcagaatcaatggcggactgaacatcggccttcgacgcgttggaataagttgccacaggagcatgggttgcggggttagactgagtgaaggtttcatatcccttgagctgtgtgattgaatgttagagatcgatagttcggtagatttaatatgtcttgcgagttcttacctccttgcccgcaactaccagaggcacgttcaaaggggctttctgcttatagtttgccaaagcctcctcgagacccttgcgatctggagtaccaggaatatagtgtttcttaaggttcagaattagcgcaaatgatcaaacaatctcaattccagttccgagctcacattaggttcgttgttaatttggggcaccttgaaagtggcgtacgtgcccatggagcgtgtgctagagctcggaacgcggcatgcgaggcgcgaaatgggcgcgcgggtgcgcaaaatggaggacatcgtgatagtttgaaatgagacaatgagttaacttctttccaagcactattgaaaagggaagatttggagaagaagtagacgcggggaagaactatgatgaaaagggccggctactaccggtcagaagctcatagctaccacggtgggcctccggaggtgtccaggtgggactggctaaagaccatagccaatcatcggtggccggctgctgtcccgggtggatactaccgggccggcgtctatcagcgcggtccaccggttttgtgaaatcaatttgttgaccggccctgtcccccacatttcaagttcttattagtcaagagataataaccttgggaagattgagtcctcgggattccccgcaaacctagataagcttgatagcggcaagataaatatcggataatcaaattcatgggtacagtatacaaagttcacaggaaggtaacgtccgatcattcccttgactgatatactttaaaatctatatctctaccacatggtattatgcacggtaaaagcatcatctttattgtaattgtagatagaagcatcctaaaaataacagcagactaagcaaattctatgcaatccaccaccacactcgctctagccagttgcgtggctgcggctctacctcctcctcttcaagtcggtcgatctcatccttgccagtgaaaatgtcaagttctgataccttggtcatccatggcgtcttgtagtatattttgtggccaaagtacagcacgaagaaaatcgcgaagacaatgtaggaaacaaggaagtccgacgcagtgaaagagcctgggaagaataccgtatagccgttggtaatagccaggagtgaaataaagccaataacatagtaagcgccgtatggctggatgggggtaatgaagggcctggacgggagcagcccgtggaagtccaatgcgctgcgccaacgctaaaataatttgttagcaagttattccatgaaaaagacaggaaaaaaggctatttaacttaccaagtacgccactgccacgatgacccaagagatgaaacctccaattgtcgtgatgttggtaaaccaataaaagacggttgaacccgaagtagataggttcaagaaagacagcagaccgatcatccaagtgactatcacagcattgtacgggacaccattcttgttgcagcgaaggaagattttgggagcctggccctcacccgcgagcgagtaaagtgtgcgagacccagcaaagacccaagaattacccgaggaaaaggcagagataagaacaacagcattgataacgtggttcaatccagtgataccagcattctggatgccaataacgaatggactggcgccagcaccagaactgccgctcgcaacaccctgcaggaggttcttgtcattgtatgcgactatcacaccaatgaccaatgcgcccaagatataaaatgcaaataaacggtagataaaccgctttgccgccttggggatgttgcggcgtggcgaggcagcctcgccggcagcagtggtgatcagttccggggagaaaatgaaagagaatccgcacttgatcatagcggtccagaatgctagaaagcggcctgtgttgatgtttgggactaagtaaggttccacaaatgcgcctggtcgttgccagtaccggaaaccgagacgatcatggtttggaccaccgccgaagaaaagtacaatacccaggatgatcagaccgacgatcgcgatgatcttgagtgatgcgaaccagaattcggcttcgccataccaggccaccgcgacaatgtttagaagtagaatgactagagttcatgcgttagaggatatcaggtataccgcactgttgggcatgtacccaccaacgagaatgatcgcaatccatacaccaacgctgactggggactgccaatattcaatgaccatccctgacgcagtgacctctgatgctatcaacattgaaaatgaatacctacacagggcatttattagtatgacaaactcggaccttgaccgaagggttattaccagtagttgtatcctagtagtatttgaatcagcattgggcttgttaaaaattttcaaagtgtcttcacataccaacagcaaatccaagactaggttccgtaaaccgagtaatcaaatatggcacagaaacaccttgaacgggaagataggtggtcatttctccaagcatgttcatgataaagtatacaatacttgacatgacaatataacccatgagcaacggagctatcacatattagccccatatcaagtttatgtttcacacgctgattcttaccaggaccaactgtcgccagcgctgagccactgccaacaaaaagacccgtgcctatacaaccacctagagccaagaattgaatatggcgcgagctcaagcctcgcttagtatctgagttgtgaatgatctccccctgcatgtcttttgggtcgtcatatggggactcaggacggaccgccgcctcgagactcttaggtgagtctttcatgatgtgcgaaggcggagaaatagaaagattggccaatatacaacactctcgggtgagagaagaagaacagtaacacgacagaaaattctagagagtgcaaaagcctataaaacaacttatatatccgaggacaggcacaaatcttattatatagccccggagaacaaagctaggatagaaaaccttgtctaaaagaaaaaaaaaacaataaaacacccaggggtgaaaataagtttccaccgccaatcggtgattcaaagtccaactagttgtcaacaacgtgagatcgtatgtccaatgtccaaaagagacataaacatccgcgccctcgtggagtctgcgattgagtttttagaaatgattggcgcccacattgccttttagttctagccttatctttgcaggattctcactcatatcacgttactcttatcttgcccttgacacattgcgtttcaaaatatccttctaagtttctaacggtcttctagtattgccgagccaaaaccttctgctaaccaagtagtctgcgattggctgaatgtttattaaacatttgcctcccgtttgcccctggatcacgtggtgtgcgtctggggaagaatccggggtaaaaataggcggacctgtgcccatgtgactctagatacaattagaaatagaccatggagccctggaatgcatctacatgataggtaattatgggttgaagcagcatactaaaacattcttggaaacactaaaccaaaagtaaccggaagcaagatcacgcgcacagaaacaccggcccggtcaccttttgcttatcgcttatcagtgggatacgcaatatcaaaccgggccgagtactattcggcatgttcagttatgcgaaccgactcttggctgcagattgctagggagaagaggcgaatatcaaagcgtcattcaatatccctcgtatacaatgatttttctacccttgacctactctagtagttctccgtagcgttgaaatttcctagaagcctgaaatctggtatagttcaaaggaaacatgaatgatcgcaatgccatccatggatcgtactacatgaaaaatgtcagggcgtcccggccggttaagatgggcctactgaccgtaccggcctggcggttgccaccggctcttacctcttacccaatgagttccaccaacataatctccatatctaaaaggtcgccttcaaccgtagctgttctacttctttagtctttcgttctaagcacttcagagctactttcctctaatagctcacaatactacgtcctcactgctagctatgaaggctgtaccttccgtgcgtgtgcctctcaaggctgccgcccaaacaaccagactagtgagcggcaccagcaactctcgatcctcggtcgcctcagtttcagccaccaacgtatggcaaccacaaacaaaagctccgtctccgctaccacgcaaggcactgacagcgcccctggctaagctgccattgtcatctgtcctacgctcgttgctgattttgtctgtttcctcatcacctctccttctcaagccatgcatctatactctatctttgctggcccatccacgcactgcattttgggatgtctccaaaaacccactgctgaacatgcttgtcaagcaaaccatctataaacaatttaatgctggcgagaacaaaatcgaagtgcaagattcgatcaatcaaatcaaagctctcgggtgccgtggtgtactactgggatatgcccgagaggtccttgtcggagaaaactcggatgccgcgtacgacgtgaaggctgctctggctgagattcagacgtggatggatggcacattgcagacggttgatatggcccaggccggcgactttgtcgctttgaagtatgtgtgataggattcctgttcaatttacaacagccgctaactgaaattcccagattcactggaatgggtaatgacgcgcttcgcctgctgcagtcgcagactatgcccacagaggttatggactcctccatcctcaaggtctgcgatctcgcaatctctcgaggcgttcgcctgctggtcgacgctgaagagcaggccgtgcagcctggcattgaggcctggatcatgaagtatcaaaaatactgcaactcccagacccccggccgtgccatcttctatggaacttaccaagcctacctgcgctctacacctgccactctggcccgtcacctcgagactgctcgtgctgaaggatacacactcggcgtcaagctggttcgcggtgcctacatgaagactgaaccccgccatctcatctgggctgagaaggaggagaccgaccagtgctatgaccaagtcgtcgagtcccttctcactcgcaagtacaattccatgctcaaggctccctcgaaggataccccaaccgaactcccccccttgaatctcatcattgctacccacaaccgtgagtctgttcgcaaggctcatgctctgcgcatgcaacaggctacccgcggcgaggactacggtgttgatcttagctatgctcagctccaaggcatggctgacgaggttagctgtgaattgctcgaaggatttgagagtgccgagaacagtgtcggggctacccccatggatgcccccaacgtcttcaagttgttgacctggggctcggttcaagaatgcatgggtttcttgcttcgtcgcgccgtggagaacaccgaggccgttggccgtactaaggactcccagatcgcaatgatcgccgagttgaagcgtcgcattggcaatgttttcagcaccagcaagtgatattcgagtctttcctgatgtccactttcgaaggatatccagatcgttctgtctttacttcgcagcctacgggttgtttcgctccatttttgcttttgcatttttattcgcgaatagctgggtgcattctgaatggcgttgctactgttttataaggaccttagaagttcactctgatgatgatcaatgaaatcaatgtttcacaatttaaatgactgtattcttggattaatgttagtcaagataggaatcaaattaagaaatcagaccagagagataatctagagataatctaatagttcgaccggcatgattgaggtcgaatcatttggagtgtagtctccaccggaccggcccctcctgaggtcaccacccgatgggctgtcccatctattattctacctctactactcaccccaacgcctctgcttctttcaagtaaaacaaacccgagaaatttgggttttgcgcatttcacaaatatacaatcaaccttggaaacactcaaccaaaatgcatatcctctcggagccagacgtttccaaaatcttccgcggtctaacacaagaccaatgcaacggcttcatctcagcactcggcaatgctctaatcagcataaccaaagaatcaaagccctcaactccagaatccgctaaaaaaatccatcaacccctccgtacagtcttcaccacaagcgatggcaacacctgcatcttcatgccggtatcggacaccgcatccaccggcatcaaagtggtaaccgccagtcccaagggaatccaaggcgtaatcaacatcttcagcccagaaggccgcctccagggcctcctagccgcagcagaagtaacagccttccgcaccgcgctggcaacaatgaccctgttcgtgcgctgcacgaccatccgcaaggacaacgttcttgttctcggaagcggtcggcaggcggagtggcacgcgcgtcttgcgctgctgctgtacccggaccaggtgcggcgagtgacgtttgtaaatcgcggtgcgacgaggctggcggagatggagagggatgttgtctctgagctgcgccggactaatcccgctgttgtctttatcacgcttgctaaggagggtgtctccgactacgagcaacggctgggggaggaactcgctgctgccgatgttattttcagctgtacccctgctacagtcccgaatttcgggtataaggcgctgcaggccaaccccaagccgcgatttatctctcttattggctcgtacaagcctgatatgcatgagattgataccgagacgctgctttctgggggtggcaaggtttatgttgattctaagacggcttgtcttgaagaggctggggagttaatcactgcgggtcttggggaagagcagttgattgagatgggggatcttttgggggcgggcgggatcgtggaggatgtgattaatattcctgctggttgtaacgttgtctacaaatgtgttggtatgggactgatggatcttgttgttggaaagaaggtgcttgatgttggggctgagatggggcttgggactcatgttgatgggttctaatatcttttggtatctctatatttaagcaagagaaacactatcattgatcagaattatgattgaaaagctttggcctcacattgcattcactcctggacgctattgcatactgcaaggacaattcaccaagctactggtaagggtttgtggtcttaaaacttggtgtattaaggtcatcatacaactagttacaccaggcgaacatcctggacactcaaatcaacgcccatttccttgcaggcatcggacagccgtttgtgagcctcataaatcgcaggacggggaatatccccacttgggatttctcgaagtcgttcttcctctccacctatggcgaacaagtgttgaatgaaagtgccgtagatttcaatagtgacgaggctgggaaacatatgcttgagcctcactaagttcaccagctggttgatgatgttgccattgggagcttcgacgcaccattgcgtcacagagagccgctccagagatggtggtaagtgcttagccagtatcaagtgagagactggacatggtcaattatgttgtggtccaatttgggatatactctataccgttaatttctgagaatgtgtgcattgggagctgcaaatgcttcaatacatgaaacttattgaagcgaatgcatccatcagcactcatgttgtagtcggggggcaagggtgtgtagtcgaggcaaagggtgttgagcgagtgtgccttggaggaaatcaaattcataaatgactcgagacagtaaccggtagccacggggtgtgaaccgctgtcctcagagcagaagtacttgaaggacttcaagtttaggcaactgacaataaattcgcgaattccacaaaccgagtgactctggtgcagctcaacatgcgtgatagttgatggttccagtggtaacaggtgtacacatactccactcagcccatatcccttgatcgtgtgcatcgatgaggtttggaaaaaaggattgagacgagagatatcccatgatttgctccaggtttcaattctcggggtttcgcgtacgatatccgatgggaatttgaaaacgacctctcgcagggactgaaacgccggtgtcggcgttggattgaatgggactaggtgttggtaggctttgcgtagcatacaatcagtgaaactggtgctgcggtcaggccagacgcattcaaggtaggtgatatttggtaagaggcagatgacgagagcctgccaagcgatgggtttgtcgtccgttgggatattatacaaccattgtttcagactggaggttgatgattgaccaaactttttgactgactgcttgaagattccatcgaagctccaggttgtgactagggctgtatggtgttgaccacatgtccacattttgcccagcttgagacttttgacttccccagccatggaggggttgtgaagaagaaagtcaacgagtttttccacccgctgagcgcagcagcaaggatcaagttccatatgaataaatgcctgggggtaaagttctgtgtacatgcgtacattgcacctggcgaggttcagtcgatcttgctgcgctgatagatgatccatgatcacaagcagcacctcagtcgggagggtaaccagcgaagacatcttgaattgcgatgaaaggagagcaagcgagagagaaatagagaaagagatggagagacgaagaaaggtgaagcaggtcagataagcccgagcatcctagagagagaatgaaatgaaggaagaagtaggaggatgactgaaagggaaacacgtccagcaggagtcgggagctgtatggtcagtcgcgacatacgcccattatacctagttcttaccataacattgttccgagcctagatgggccatacttacgtccgacagataggtcagcctataaattcttaaagctggtaattgattcgtatgacatttacatgaaataagccatagatatagaacaaaataaagaaaaataaggcaaaggcataaaaattcccaaaacatcgtccaaagccataaataagagaccgatgagcggaggcaaaatgaattcggggcggggatgtgcctttatcgattagcttccctttctctcctcccatggccgtttttccaaatcctgtatattcctggactgaatctattacacttctctctgcattccaatctatccaccctcttctcttttccctagacgatgccctgatccgctgtcacggtaatggacgactcgaccccgacgcccacccagcaaaaacgtcctcgcgtcgccgaagagaaccgcaaacgagctgtccgagcgtatgctatggccctattgtaccaactcaatcgcgtcgtctaacacaatcggttttgcgcaggtgtgatggttgtcgccgggtgaaagagaaatgtgaaggaggtgtgccgtgccggagatgtctgcgatatcgccgccagtgcaattttactcacattgaccccaatgaaaaaacccggtcaacgtctagttcgtaggttggccgcataatcatatccttattgccatctcgaccgctaatggcgcaatatctgataccagacttttggaccgtgcagccgcccaaagtcgaaatgacatcgccgaggcagaacgggtgcgcctgatggaacgtctcctatcgcattatgtacccaatatcactttcgatattcagtctttgcgacaggctgcagaggatctgaaggagaaacaccgccattctgagtccgatgcgatttctacccgggaagatcccaatgagctggaggatcttgccattgatgaggaggattttaccatcaaggctatgccagataatacaacccgtatgttgggatctgggaccatatacaaggatttgttgattgacactatttctcagaatattccggggaattttcgtacttgaatttcacaatgaagatccggaagaagatcgatgaatggatgaagactgcagcacccgaggtaggtttacgtgaattgtcggtgagcaaatactcatgctaaactcaagcccgtaggcaacttccgaagttgagccttttgaagaacgatggagaagtacacaactccagtccgcgtcacctcaggtgtctgcctcaattacatgtctaccgccgcgctatgtcgccgattttcttgtccagatcttcttcaaatacgcacaaaccaataatttctatattgaagaagactggttagtcgagaaattgggtatctgctacaatgaccccgaaagtttatcatttgacgatgcaggcgccgtgtgctgtattcttatggtcctggctgtgggcacccaattcgcacatatggagtcacctacacccgtgaattgcttgcctccaggctctacggcaaatcaagaccatcacttctcggaagacgaagtcggactcacattctaccaatttgcttcgaggcttctaccagacatcatcgccaccgcttcggttcgaagtgtacaggcctgtcttcttattgggacgtacttgcttccgttggatacttcaggcttatgctatacatactttgggctggcactgaaactggctatacaaaacggaatgcatcggaggtatcacggcgaaggcctttctccacgaatgatcgaagtgcgcaatcgcgttttctggacagcttttactattgaaaagcgtataagcattctccacggcagaccatcatcgttgtcggaccccgacgttgatggtcccctgccggttgattttcctggattgatgccagtcaatcaggtctcaaaccatacaaacatggtaacacttattacattgactctgaaacttggggaggtttcaaatgaaattacctcattgcgaaaataccgcaaagggcaacagcaggactgtcttgaacgattactgagtctccggaaacatctcgttgattggtggtcaactctaccagaggaggttacctgtcgtgatctgaatcctgcagggccgcttttcaggtctaatgtccatctcaagctagactactgtctaactcgagtctttattgggcgccctttcctgttcagcaatatcaaaggcatctcccagaacccctcgcaaggcccgtcgtacaaggggtcttctagtctgtccggtctgtcaaagtatcgtgcgactcttgttacagactgcgtggaagcggctttggaaatcatcgatctgtgccgcttgctccgtgatgagaccggtctcgcgcgagcctcgtttaccgaatttagttcatgccgtgcagctttgctagtcatcttagctcagggcctgaccaaacgaactgaaagacttggggctgctctcgaacagggaatttccctgatcaagatcatgtctatgggtgttggctcagcccgttcggctgtcagtgtcatagaggcgctcgaacgtgccattcgtcgtctcgaagcatggagcgagacccagccggatatgagcagcggaggtaccgtcgagtctgcctatgaccggttcaaaaactgggagatgctttggaaagcagggcctatctcgccgtccacggtcgcatggcaacagcaggaagcttttgctccaagtgagcaaaacatcccacaaaacattcgctcccaagcctctacaatggcgggtcctgctactcttcttcatggcatgtccctgacaccttcgtctgcggccatgattggcatgggtagtgctgccccaacacccgttgcacatgatcagagcattccagaaggagaagactcactcaccgacactttctccctctctcatatgccacactttggcttcgatcacttcgtttccaattttccacaagagctgggcgagttcacagctatcccatgcttcgaaccagattcgcaggctcaatctaatgggttgcctcgtgctgaaatgaaggcgctaggtaacaggtctgacccccctcactggctgaatttcatgagggattcatgatcactttttttcctatcatgctttgttcacaagcagcgactcatctatacaacatgtttaggttgggtcttatgactttgattttataccatcttgcgactgttttcacggctatatattgtgcctgggtgatgcaattccgggaaattgtgcactgcttattctcaatgcaactattcatacattgcaatcaatcttttactttgtctaggtcggatgactttaggcttttgtgcacacagagatatcttaatatctgctcattggcttgtgatgatgcttcgagcattgattgatgaatatacataatgcgcataaccctaatcgaatgtaaccttctttcctgcgaaaacagctggtgcctgctccttggccttccgctttgcctcccaagagggatgcaatgggccctcatccttaggcggacctttaggcttaccactagaatgctgcccagagtgaggaccatcagggccatctctgttctgaggccgtccagaaccaccaccgaaaccaccacgtctggcccctctccctcctctcccacctctcccaccgtcagttgcaccgcgcttcgtatcccatccattatctctgccaccatacttcgcagccagctgctcctgcttgacatggtttgcactgacaccgtacttcttctcccacaaagcccgacgcgcctgctgacccatccggttcttacggacaggcttcgcaccggaattttcctcatcggtggcttcttccgaaccagaccagtaaccgccgttcattaaagatggtaggaatgtcgtggttttcactgctgcagcagagcccttcgttgcctttgctttcttaggtggcggggagtctccggcggagaatgagggtgagggagaacgggagatagaaccggagatatcgtctgcggcggggtcttcctcgtcgccagattccgagtcagcttcggagtctgagccaggtccaagtcgtgagttgaactgtgagaggtcctcgtctccggattcgtctgagccggagatgtccatgtcgtgagccgggcgggagacctgctcgccgcgcctaggttttgtcgtcactgcctctgattcagactcggatccgctttgttcctttcgcggcttctttgccagcacatcctctttgttgtcctcttttttcgccttgctagtcggcagctcgtcgactctcagtagtttccgaatgccggccatgattccaggcatttccttctgcaccggagtggatttgaacagtcgcgccaggatattcgcttcggcggtactctttggtccctcctgggagaccttcttgactgcctggaactccccgaatgtccgcgtctctgcaatccgtttcgtcctgataagttgtttgaacaggtatcgctccgatgtgacatggtaatcgagaccctatgagaacagatattagcaatcaagttcctaagcgagaccctccggagagccgtctgtccagtggaaaaaaaagccactgtaactaggtaccttcaaagtctcgatctcttcctttagtcgcgccaacgccttatcgtccttttgcgccttggctgtcttctctcgccgactgagcttttgtcgctcaaagccgcgcgatgtcttgagaccacgcattatcatcaatacaccattttcgaacatttgcgtcaaccgggttccgtgaatggacattttgcgggtgtcgctcgaccgcgcggggccgctgacttcatcgagcttgcgtttgggcatttctctctgtgctatgattgtatgagtattcggggtagtgaaatgagtgattcaaaaaattaatggctcgttgaacaaaaaaggaaggcagtttcgaggatggtggtgatcgtcggatgttggtgtagcttaatttttttttcttgggcggatcccggcgccaagacagacgcttgcaatgaccaaattgatatctcgttcggggtacttcgtactgtaaattggacaataaaaaaaaataaaaaaaccgaatatttattaccaactaccgagggctaattagcttataaatgagctggggcaacttgaccgctacaatacgttgcttgatatattgcttgggaagaccatcgattaacactgacggatatgtacatacaaacatggcaaagaaaataatacgcgaacagaacctttctatttcttttcttcctccttctcttccggcttgggggtcggaagcttgaactatagttgaataggttaggaccttgtctttcagcaaggaagataatgtgacttacggattcgggagtgcggttttcacccgcacccacgggctcccagctagtagagccgctttcaaagttacggaaggcctgggtgagctcaaggggctcaataacgatgcgcttcttctcttcgtcatagcgcagctcagtataaccggtcaaggggaagtccttgcgcagtgggtggccgtcgaagccgtaatcggtcatgatacggcgcaggtcaggatggccggtgaagaacacaccgaacaggtcgtatacttcacgctcgtaccacaaagcaccctcgaagagaccagtcacactgggcacgggagttgcctcatccgcgtaggtcttgacacggatacgggagttgtgacgaacgctaagcatgttgtagacgacctcaaatcgctgatcgcgggtcgggaagtcgacagccgtgatatcggagatctgggtgaactcggcggcagtgtggttcttgaggaagctaatcacgggaaggataccagcgggagcggtatacactgtgagctcatccttccacactgtgaactgctggacatatttgggcagacaagacatgacgtactgcccataggcgtgaaggctgtcggccatgggctggtacttgtcggtagggttgaccacgggggcgcgcagaggtcccggggctggcaaaacacagttcggttagctcaatttgtcctatctatcggctcgtccattgcacatacgcgggcgctgcgcctggcgcatgttctcaggttccgggcccggtgctgtcgaggccttgggggcccactgaagggaggcggaggaaaaggtgcgggcggccatggacctcgtggcggatgccacagagcgtccagaacccaggcgcatcaaagagcgtgcggaggccattgtgtagagggagcaatggcagatgcaacgtgaggaggggacgaaggcacgtaagtcggattgtgaaggtttagagtggtcgagcactttagtcacgtgttgggcacccgctaaactggatcgggcaatgccagcaaaatgaagccgcgcttcaatttccttccttcttctccatcaatcatctccaccatttcttttcccctctcttcttctcgctcctcctcaaacatctaattaccgttcgcctttctacactttacagggcagcgtatttcttttattttctcagtttttcatccaatttgatcaggtgtcggcgtttgagatctcgtgtccctctccggttatcaccgtattccccgcgatcatgtccagtctttcattgatcgattccgtcatcgacgacgacgatgagttttggtacgtctcgaagctcactcaacccgcgcgatctgtgtactgatcaccccacagccccctgtgcattgaagagttcgatctctccgataagaatttcaaaccgtgtccttgtggatatcaggtatgtccgtctgatcaaggattttcacgcgtctcagcagtacttgctttgttatggcagggacagatggctcgtctttgtttctctctagcagacctgactgacatgtgatttttttttttttagatttgccaattctgctacaacaacattaagacgcagaatgaagaaggccgatgccccaactgtcggcgcggatacgacgaaagtaccatccagtacaagattcccgacgttgaggagtgagttatccgatgctctgtgatatctgagccacatcccaactaacctgctgtgtttaggttcaaggcagatctcgcactgaaacatcgcaaagcagctgctgcgaaaaagaaggaagccgaaaagcgtgaaatcgaagcctccagccggaagaacttggccggtgtccgtgttgtccaaaagaacttggtctacgttatcggcctcaaccctacgatccgagacgaaaatcaactccttcaaacgcttcgtggacgggaatatttcggtcaatatggcgagattgaaaagatcgtggtcagcaaggctaagcccggtggtaaccccaaccagggaattggtgtttatgtgactttctcgcgcaaaattgatgctgcgatgtgcatcaacgccgtggacggttctgggaacggcgatcgggtgctcagggcgcaatacggaacaaccaaatattgctcatccttccttcgcaatgagcaatgcaataatcggaactgcactttcttgcacgagactggggaggacagcgacagctacagccgccaggacctctcatctatgaactccatatccactcaacgcccaaatctcccacctaccccctctcacgtgaggtccgctcaacccatcgcccatcctatgcgccggcaacctagcaaggatgagtcgatcagtagtcgcaccggcataccagatggcccggctctcccgtcaactgcaagttgggctaacaaagatgctgctattcaccgaaccagaaggactagtctcacgggtagccaagcctccaacaatagcccacggcccgcaagtgccaatgttgcgacactagtcgaagaaccgaaacgaccagagaagccatcgccgatttctcaagaagccccacaatcaatttctcaagtcgatccccgatctcccgccgcgccaccacgtccccgtcgggggactcaacctcccaagctgccatcaccgtttgacggcttgctcaaggatatgaactcggcggatttcaagttttccttcagcacggctgaactgagtgccgaagaggtcaagttgattaaggattacccatctttcatcgatccatatggcggggtcaagcgcagagcaatgcgagagaaagtcgaacaagagcgtcttagccgcgagcacgagttgcttcaatccgttgcagctgaagaggataaccgtgaagctggtagcctccagctaggtggtgagccagaagaaatcaatcccccgcgcagtcgccagacgcgcgagtctcatggggctatccagccgccctcgcagcaggacacggcggataactcaactgttggatccccagtttctgcgactagccatcaattccaaggcctgaacctcgctggacgaagcttaactcccttgcagcaacagcagttgatgttactcaagtccgccggtaatcaacaagctggcctggctgaccctctcggctctgccgctctggaccaagccgcccatgtccgccaaggccttgtccacaatcagatggcacagttcaatgcgctgcaggcagcacagaaccgacagtcttcccgattttccttcgccaatgaggccggttctaagaatattcctaacgcgcgcatgttgggccagatgcaatcttcttctcccaaccctctttctgctcctagccctcaacatagtcttgcagcaagtggcttctatgctagcggagtgcagggtcccccaccgggactgaagacggctggtacccctccgattagtggtggtggaatgttcgcccaaggacatggcttcacctctgggcttggtggtaatggaggaaagcaagatccaactccggagttaatgcgagagctactgcgtggacgaaatggtacgaatgttagtggtttacagggccaggaggcggctaagcgtgagttcatgttcccttttcttcaacagcacaataccccaccccctatgactcctgtcaatggccttctcagctccttctatgggcaccaagcgggcgtgatgcctgattccggtggcccacagaagcagaagaagaaggggaagaagcacagacacgctaacacttcctccggtggaggtggtgtagtagatcttgcggacccgagcattttgcaggcgaggatgcatcaagtcggcgcgaatgctactgctgggcaagcgttgtacgggagtcagggccaaggtgggtacaacccctccatggtgtacggtggtggcatcagtcggtggtgaatccccgcggtttcacttgttcccgtgactggcttcctgcattttcctgttcgctttttcgctatgacattctgcccttgatgggcctgctttatcctgatgacatgatatcaattccctttctttcctccccgtggaggaggtcttgcatttgttgtttctgttttattcgcggtcaggctggcagctctgatttatgcgatgggctggacggtcacctggcgtactagggctttcccttgtctccttcaattgctatctatttcttgcatgctttctctggctctttccaggtgtctttgcatttcatggacatactggcgtgtgttccgagctcctgtattcggcggctgtgtattccctttctacttttttgcatccggacttccattatacgatctgctgccctgctgcgtcttgaagaccgcaggtggtgtttattatggattagtgtacgttaagatctccctaccctgataccacaagccgaaaagggtcttattcgaaatcagtctcctcacagccgccgtttacatagacgctatgtcctgcaatgttcctggtccaggagatgcccatcatgtaattacctcgtgatcgtttttgtatcttcgcttaaatccgctgctgctgcttagtcgcccttactaaagggatttatttctatccctctcatctgcccagtcacattgccacattttactttcttggacattcgctaacccaatgctctagtgaatgaggacttccctcctcttggagatcaatccaaggatcgacgacctgttgacagctttgggtttttgaagtctcagttacctggcgagtcggccgctcgtgttgggactcctacactcccacctggactgcctttacctcacgctcatccctcgtcttctgtattccaggaccacagttcctctaaaccttcgtctcctgccccaatgctcccacctggcttgacgcccaacatttcgcgactcaacagcccatcgcagagtcgtatggacagtccctctcgtcttttgagtcctgaactcacagtgggtggacctttgacatcaagccgcgtgaaggacgcttctcaaatatctttcggatcacctgtacaaaagtccgccactaaggctcgtaaccaacgcaaaagccagttcaatattggatctgatttcaaagattcgcctgcaaagattgcataccagttgcaggagagttctgccactacgaaaggcaccccgctcgactttggcgccccactacccacgtccatcaagactgagcaggcacgacctcctagctctgtttccgtcatcgggtcgcggcccgacacgccgcaaaccatcgcatctcgcctatctgactcccctgcccctcgtcagcctcgtattctgcgtgtggtagaaaccccgaagacagaaactcctcctattctcaccgcaccatctgtgtccgcttctgttgttggtggaaccaggtcccgctctaggagacagagcatctcgtcaaccagcatccccggaactcctgctgatatgggttgggacgctgattactatccttccacttctgcttctcgtgcgaattctcctcctgcctcttctcgtatcggctccgctcccgttcgcgccatgaccaagagccaggttaagaaggaacggaaacaaaaggcaaaagaggctgaggctaagaaggtagaaaccgcgcttgtgaatgaggagcctgttcaagcacctatcatggggcgaaagcgcaagaccaagaaagcccccacggccgccccccccccccccccccccgccccccccccccccgcccccgggcnnnnnnnnnnnnnnnnnnnnnnnnnnnnnnnnnnnnnnnnnnnnnnnnnnnnnnnnnnnnnnnnnnnnnnnnnnnnnnnnnnnnnnnnnnnnnnnnnnnnnnnnnnnnnnnnnnnnnnnnnnnnnnnnnnnnnnnnnnnnnnnnnnnnnnnnnnnnnnnnnnnnnnnnnnnnnnnncccccggcccgccactgtcagcacagctgatgcacccgctgccagtggcccggaaaagtcgagctctctaaaaccagtgaacgttccttcagtcaaggctgaacccaaggtggatacagcaaagaaagtgaaagccaaagagaccaagcccgtcagagagcctaccccaccccctgtcgaagagcttcctgttcagaaggaagcccccgtagagccatggcgttcaaacaatacagttggacggttggtcaaggactccgaggcccttggaagggcaatcaaggatcttttcatggaacgaacgaagcctcttcacgagttgctcgctgagatgcataagtccggcgaacttgatctcaataagagctccctcttcaaccctagcaacctcagccagcgcaccgacatgaagtgcactgcggaggactacgattatctccagtgtcccaacgaattgactgaggaggatcggaaaactctacttcgtggagagcccgttcgaattggcgatgatttcctcaaaactcgatgccttatcacaccccgcggctgcgtcctacgccacctcgaaccagaagaggaggaacgatacctagagcttgagaagaacatgactggtgtctcagatgctttcatgattggggacgacgcaagcaatcccagcgggggcctggaagcactcttcgcgaacccggagaagttcaacatctgctgggtcgacgacatgcccactcgcctaggtgccacgtccccgtcatcttctcttgaggcggcggaatccgtgattccgcctaatgtcctctcggccatggaagcagacagcacccgcaaccatgactgggctgtcgccaactcggcagaatttctcaacaccacccctgctgccgtgcgctccttcgccgcagtcaccgcgcagcacatgctgggtaatccgggcatggttggcaccaaccccactctcgacgacgttgctggtttgaccaacgaggaactgaaggagctctctggtcgttctcaaaaggacctcgagctcacccggaaagaaatggattcgctcgacaagaagttcgcagctctgcttcgacgcaacaagaagcttcagcagcaggcattgaatcttgctgctgggccggaagtgtaatcatccgcactatcctggaccggagctctcagttccctttgcaatcgcagcttcctgggtggacttaaatctccttgcatgtacatctatctaagcctgaatgaatcattgtagaatacttgttacatctgtcgacgtgcgttctagtaatctaatttccaacccttccatgaaatatgcaccttctaggcctatcctcacctggctcgcaatgagacaacttgattctttaacgccaagtgaatatcggcacatatccgaagttgactcttaccagttttgtgtctgatatatataccctacctgcctgccatcatgatttcaaccaacaaattaaagacgaaacctaccccgtccactaagttatagtagttaaagtgagaaaacatatcgaattccaattatcatcggctaacatggctcagaacatcaatgtctacaggtcaataggggaatgcgtcaagggatcaatcaccgactccgccagggctggatctgtcaacctccacattcctctactccgtacattttaatcaagactagacatttaatgaaggctcgttcctccgaagggatccaacattagctgattcttggcatcacacgctccttgacgattcaggttcaaggtggttgtctagtcctgaaacatgtggctgatttccgttattcctaaatatgtcaagtctctcacttctttcggtctggtacaatagggattgaggctgatacttgacgcttctgtcgctatccgatccctttcttccccatgggagattattttctcgactttctcggctggcatgtataatgcgtaactcactgagtatactatttcccgccttgttagtctttatttcttcactgcgctcatttctacatcattggccctctctggtgctatattcatccgtttgtttgttcacgttcaaacactacgatgtttcaattactttctgtgatagctactctgtttacactagcctcaactgccatatcgaccggcctactagtaccactatacgcctggcccggaacagacaaatggaatacactctacgactcaattgcagcccatccatcaatcccattctacttgatcatcaacccgtccacgggtcctggtgacacagaatacccagaagacgtcttcataaccgccatcgccaagctaaacagctatcccaacacgaaaatactaggatacacctacacaaaccaaggaacgcgagacagctccgaagtcgaaaaggacatcgctatctacgctaaatgggccagctatgcagggcagaatatcactctctccgggaccttcttcgacgaggcagcgaacggcgaagatccgagcaagctcgcctatttcgagaacctctctcggaaatctaagagcggtaacttgaccaccgttatcttcaaccctggtgtcaagctcgtggcagatgttgccaagtggttcgcggcagcggacttcattgtggagtatgagaatacttatgctagttgggtggcttcggctcctgatgatcgcttctcgacgcctgataactatggaagggatgctgttatcttgaatcagacgcccgaagatgccaatattgataatgttgttcggttggcgaaggatatgggcctcggtgctatatatctggcttcggatgataattatatgaatctcaccactgtgactaaggttgcaggtgctgtcgcacaaaatcagattgttaggcgcagggggtaccgtcggtttcagagctgagtatataagatcatttttatgtcagagtgcatgtggtcgagtgctattttgggttgtttatatagaaaccacggaagattccataaaccaatgcaaccgggatacatcactttctgggaatcttcgaaatctatatggatatggctctcgtgttagaacgctctaacgccctgaggtttacatgtatattttgtagaagcaagtcatctcaatccagaccgttaatcccatctttatacggccgcaggtcatactcatcaggatatgtttccaagatgcgcttgagctccgtcatctgctccctctgctcttccgtaatctcctcataaacatcagcaaatgcctccctaagcgagggcttcttctcctgctccgccgcgccaaactccctaagtaccgccttgcgcatctgatctcgcgcctccttctcctgctcctcactccaaagcccctgattctcaagccacttccgtagccgaatgataggattatcacgacgtttccaatcctcaacctcgacgcgggcgcggtacgcaaagctgtcatcgctggtactatggtgcgagacacggtagctcatggcttcaattagcacaggccgtccgccctcgcttagggcaagtcggcgcgcttctttcatcgcttcgtttactgcgaagacgtcgtttccgtctacgcgaatcgtgtcgatgccgtaccccacgccgcggctggcgattccatcgccccggtattgctctagcgttggcgttgagattgcgtaaccgttgtttcggcatataaagacaaccgggcaagaccgtgtagcggcgatgtttagcgcggcgtggaagtctccttcgctggcggctccttcgccgaaatagcaggccacgatgcgtgggtcccggtttgggttctggaggtcttggagtttcagcgcataggctgcaccggcagcttggggaatttgtgtggctaatggggatgagattgtgtgctgttgggtataatgttaagaaaagtagattgatgtaaagaggtggtggtactcacaatgcggggatagttttgtccatagtgaactggcatattccgaccacggcctgtatcattgctattggcaaagagctggctcatgaagttctttagggtgaatccacgttgttggaatacaccggcttcgcgatattgtgcaaagaccacatcgtctggtgtcaacgccgcggcggatccaactgtgatcccttcttcgccggcggaaacctgcaggtagacggtcagatgagttattttctttatttaaatcttaagtaattgaacgtaccatgtagaaacttaagcggccctgccgttgtgcctcgaacatgaccacatccataatgcttactgcacgctaaaagttaggtacttgatagcgcatcaagcgtggggtaaccaaccagatagcatatttttgtaccatatcaagacctcctcattcgtaacatcaggtgccggtctcttcttatcaacctggcgaccgtctgagtccatcactcggtaggtagggatagcgggcagatccgaggctttgaggaaggccatctccgaggtgaacttgctgttcacggccccagggaatcgaacactaaacaaatcaacatctcgtcagcgtttctccaaaaaaagaaaaacgttgtcctcggagcgatcacctgtctgaccccggcggctgcgagatggagctactccacctccgtgcggggacgatgcgcgctgtagttatgggctggctgcggaggccaccccgggtcaggagctttagagacattttgctctctgatgctattaacattttagattcaatttgtttcaatggtaaaaagtgagagatcccaaggtctttgaatgttaaatctgggggatgcggagagcggttggcgtcggcatcttagcgtcactccgcggccaaccgagtatccggttgatgcggggaagataattctacaaccacattgagagtgaacaaaacatcattggaagatctcaattgattgtgtcctttgtattcttatttcttccctagcataaggcctcaaatctcacatctcacatggctccccagcggtggggctcaaatccctcgcgtatcatatcctacattgcgacagggatgagagagagtcaattcgttcctcctctacctattgatggtcgaataattcagagcggtggattgcgacgatgttggcagatgtatcatagatcacaaagttgagttacgtgactacctgttcttcagatccctacgtcaattattctacttcccggatgtcgtagtagccctggagtccaagacccatcttgtcgaggactatacgcttcagggcatcggtgatagtcgtatccctttctagaactgggcctgttggaagattccactatccatatgtggccgtgccggtggcacgcttcagatgtaggacggtaaattgcccgttctcttgtaccggaagtctgctacaccgacgcgccattgtttattttatccaggggtaagtctgagattctggcgccgatgcttgtattccatggttagatggacaagttggtatgagaggatagagacggcgctgattggaggaaagttgaagttacaccaagggcaataaatactgtttgctattttgtttgctattttgttctctgtttaccacaaaagttgtctccttcattgtctaagacttagatgagtataaagccaagcacagccgagtgtataaaatgagtcaaaactaccaagaagggggtaaattgaacatatctaaagacattcaaaaagatatctaactttttttggaaaaagcccattgaaaatatttcatgtaactattctctataaagtccacgggtgttcctaatgaggtcggatatgatgacatcggtgcctgtgtaccagcctttgaggcttcggctccactatcggatggagacgatgacatagttggaatcgctttcctaagaatcttcaactttgctttctgtcttcaattctttgtacaatcatgtccaaaaccgatcaattccgcgaggtattgaataccgacatcaggactcctattcccgaggagctcgtaaccaggatctcatccctgccgccatttatccctataccgggtgtctccaactttcgcgatctgagccatgataacaacaaagtacgtccgggattcgtgtatcgttcgggaaacctgtcaaacatcttcggttctgggaaatccatcatcgcaaccgaattgggaatcaccacaattttcgacctccggaatgaaggcgagcggcaaagagccccttcaccctctatcccaggagtcgagacgatatggctaccatacggagatcgaccggccactttgaatctccgcgattttgcgggcgaagacaagggcgcccaagggttcgtgaagatgtacttcgggatcctcgaagcggctgtcccatgtctcaccgagatattcaagcatatcagagataacccagacgacccgttcatcgtccattgctcaggtacgtgccacgtgtatcaccttgctctcatggctattttcgtatagttgcgtgcaaaatcccattcataatcgacaaatgctaaccataggtttccgtctatagccggtaaggaccgaacgggtgttttcgcctctcttgtcctcctcctaatcaatcgaccccatgaggatattatcaacgattatatcctcactcgagttgtaatggaaggcgccagggataacctcatggaggcattcgcggtaaacacagaaaccggtgaagccgacttcagccaattgagccccgaggcactgggtatgcttgaaatgtgtggtgctcgagccagctctatggaggctttcctggtatcatttgagaattcctataaaaatggtgtcgagggctatctcatggataaacttgggttctcacagagtgatctatcgacaatgcgtaagaacctgacctagcggatcaaccgcgagcatctgtaaatatataaacaagcatgtacagagtatttatatattactgcattggctatatttgaaattagaccaactccaaggtgctagctctgatttcatattcttcgtgtcaatatttcagcgccgagagctaatcgatcttctcctagatgggaagttgtcgagggctgtatcgacggcgccaacttgcaaatacggaattggtacatgcgcggcggataggaggctgcgcgaaggtcccgtctcaggagactcattccgcgtcttccgaatactagttatattgtagacagagcaatatgggatacaaagcatgaattaaattgagttgttgactgagagagggtagaaaagatcgtatccgccttaggcaggaaggtggctcaggatgatacgttaggatggtacttttgtgtaggtcacctgctcatttccagtccgatatcctgccataatcagtattcttctgtcagcttcttccctcctacttgtagtgttaactatggttgactttccttatccatacgacactgactaattcatatcaatatttgcgtgcattatgtctgtctctctaacttatactaccaagtttatcggcatctactagcattgtagatagccgtggcatcagtgaggaacttgtcaaacgccccgtcaccggtagccgggacgatcgacttaggaaggtcctcaccgtcggcattacggtcatcgacagtcttagccttcgtcttctcaacccacttcttggcagacttgaactcggcatctgctgtacaatgatcattgtcatcgatcgcctcgagcatagcaatcaagtgcttgcaagcagttgcccactgcttagcgacagtcgtccagggtgccacgtccgtggcaaaggccttcgtggccattttggggagaacatcggggatgctgatgatgagtgcgaggcgatctttcaacgcctcggttccgtcactggaaccggttctgcgaccggcccagaaagctgtaatgtccttggtaagcttgggcgcattgacctcaggactttgatatggccagttctggttgaggtctgtgaatgtgataagtgagttgtgaacggttgtgtcactccctgaaagctcccataggcttgcattcatagacttggtggcgttgtacgatggcgcgttccacgtatagtctccatagttggcgagtgcgatcatagaggcgtatggttggttcatcgggttcgaggtgaagccaaccagacgcttgtataattcggcggcacgctttgtgagcgggttgaggaataggcggtcacggttgttgtcgttgactgggaagttgtcccataggaaaaggttgtcggtgacgtagctcgagtgggctctcacgatactttcgactgtgatattgtcgctgaatattccttcgccagtccactgaacgcggatcttcttgttcagcttggtgccgaattctttcttgtaaggggtaggtgcactgccggcgtagtcggtcgggacggtctcgaggtcttcaagatcgtttggctcaatgtattgcgtctgtacacggttcagatagaatgcctgggcgtcggcaacccattcatcattctcggtttccggccacttcttcttgtccgcatcgcaatggaactcaagggcgatatcatcgagagggatgtagaagctgctgataccaaagtcacgcagctggttaaacttggtgacagtagcgttgaagtcctcgtcagatgagtaacatacgtctaggccgggcgatagagcataggtgaagtcgacatgattgatatttgcagtctggacaagttccttgagctgggtaagctcgtcgccgctgtaaagagtacgccatttggcgcggagaagtggatcatacttgggcgtgtagacataggtgttcattttatgctttccgtggaattcaaactggtcgagacgcgcctcatgggaccaggggacaccgtagaaaccctcgatcgagccacggatagacatgagcggccagtcgcgcaccttgacaccgggaatatggtcatcggcgagaagttgacgaagagtctgtgccgcatagaatgtgccgcgggtgtctacaccgtttattacaatgcttggctgttgctcatacttgccagatgcaagaacatagccgtcagcgtcgaggccattcgcggaatttccagcaagagccttggcagcagcgacagcgactccggcttccgcctctgtgccaacaaaaatctgtgtacccttactgctgggcttggaggcaagaacagcatcaccaccggcagcagccacaactcccttgaccgtagagatcgtagcggagtccttgaaattgtccgtcacgattgtgacattacccgtgagcgatacctttccgcccgtgaacgtgatttcttgcggagtgggccaaaccgcggggcctccatcatcatgtataacaaggtcgctgtggtcaattgatgcagcattgacaggcccaagcgcaaaagccagaagaaaagcccgaaggcaggtaatgcgatgtgaactgaacattgtgtggagaagtatcatgctcaagggcgtggtttataccaagaaaggtgatcacgacgtgtttattgatgacttgcaagattggaagttacgatgccacgatcgattacatcatggcgaggagagtgcagtatcggggtttgatttgatttgattatttatcaggtcgtatgcagccccgatgcatactaagcagcaatttagcagagggtatttcgggtatgccagaagataaaatatagggaatagtgtttcaggtgataatgttcgcaaggggcagtgctctacgatataagacagagagcgaacctgcgacgattcacaattcacctcctcccgctcgtaacctcggaacgtagcgcgtctatcgtaatattatagcgagataacctggcgtcgccgatcgttgattgggtggacacaagtacaaccttgtagatcgtcagatatcgataccccaagccacaattgttaaagaataatttagatatctcgccgaaatacgcttaagcccttaaaagcctaaagtctccatgggctataaccttaaaattgcgtggtaaacgagataaagtatgtgaattgaatatattccggtagagctgctagaattaggacttggtatgacagatggggatttcttgatgagaataatgggcattaacgacgtgagacttcaatgatctgatctatccagctcaaggcaatagctgtttggatattattccgctataccactgtttcgattcagtgatatatagtacgttttcctggtcgaggttgatatatgcaaagcgctgttattaatgaaggttactgcctcttccaacgaactagttatacttcggaagcataattttcttccaagaccatctggacctatccacctgcatcaagactaacctgctctgagccaaagggaaaccttccctttcagcctagatccgaataggtaaatgatatactatccccacatcactacggggtaagaacaagaaactagtaccggtgaaaacccactggagccatagactatcctatagacccggtcgaagctcggaccgaatgactgccgatgtaaatagacagctctggatttctcggcaagtgccattcgtactgctaaaatggctgaatggatatttactgcgttaaattcaaccctaaaaatgaaagctgggtcgtcaagctagtgatgctagtgtagtggatcgctttcatactagggacgaaccaaaacatacatcaacatcaatcctatcgtttggatctatgtttgttctgagatattcactgacgtgaaaaaataacaagggacatcattgcattcgtcaatatatgagtatgttatcattgtaagattgcgccaaaaaaaaccctaactggcatgtaaatgcatcccaaaaccattatgcagagagcttgattgagaataaagtttgtgccccttctttaccacttgttgtcaaaagctttgccgtcaatgtagttaatcagctcctttactgggggcagatgatcgcgaccagcgccaaacaacatgccctgacgcaaaactttgcggtagttcttgcccggagacaccttaccgagaacatattcttggcgagtctcgactcgagtggggacagggatagaacggccgacgacagcctccattccctgccaagcaaacgtaatggcctccttcgcgccaccagggataccagcctcgtcaagcatcataatgcgtgtgttggggtaattctcctggataaaggcggcgatgttggggttataggctccaccaccgcacatgaatatttcggcgatctcaaggcccttgggagcatagcgacggtaatggtccacgatggcctgggcggtaacacgggttatggtggcgacgacatcgtcaggcttgagccctttggcctcagccttagcgatgaattcataggcaagagtgtcacggaagacttctcgaccggttgtcttggggggttccaacgcaaagtagggatgtgtcaggaagtcatccacaagtccctggtcgacggcaccgcgggctcccatctcgccgtcctgatcgtattcgcgctcgccgttagtatagtggcgaactacggcatcgatgaacacgtttcctggaccggtgtcgaagtcgtagcaggcatcgacaccgccgtggctgtccgggagcacaaagcagacatttgcgatgccgccgatattctggcatgcacgcagctttgtcgggtggtgtagcaccagcgcgtcgaaaaaggcaatgaggggtgctccctgacgtccagctgcctgatcactcactcggaaatcggtgaccgaggtgatgcccgtgcgcgaggctaggaatgtgccttcagccatagtcaaagcgctgcgggtctcaccggcttctggcatggagagtagccagatggtttggccatgagatccgaggacgtcaattgatttgatgtccacattgtaatccttacagaactggtgcacggccgaggcaaaggtctcgcccagaatcacattgacctctgacagctcggaaggggatgtcttattatgcaggatcatgttcatcacccgcttcttgatcaccggctcaagtggaatttcaccatactgcgtcattggtcagcatgtcgtaccctgtgcagcattcacgtaggcagtggtacttgccttgagtagttcgaagtgcataggcgattccggggtctcctggcagaatcggcaaagggcgcaatcaatgccatcctagagctgatgagcgtggtgtttctcgagtgaacagacggccacccaccatcgaggttccgctattcagccccagaactgtgatgtctaaactatggctggaagtgccattgacagagttgatcaccatgttggattccaatttgcgaattcaaacgatcggaatttttttttaaaagaaacatcgtgaggatcaagacactatttaagacccggtccctaaccggaacccataatgaaccaaccggtagatggtggagacagaatattcgcgtcggcattctcaatctctctgatagatctaatattggttagcaacaagggcagaagggatgaccggcaaaacgcctattaggaaagaaaatgataaatggctacacgcttgtgggcttggcccccgcatgaacagctccatcgcgccccccggtcttaccaagcttggccttcagattcttcaccaaatgccgggggcgggtccaattgcaaggattactcgagatcgcgtattttttgcttttggcgatctggggaagtggcttaccatataacatggggtataccacactctggaagcgactttcgccacgtcagctgaatgtcgccatccagatattctccctgatctcaatcttcttcgagggttatgaccagggtgtgatgggtggtgttaacagctccccgagatatgtaacagaagttggcatcggtagacctgatgggactgtgaccaacaccactcaccaggggggcattgtcagcgtctattacctgggtgcgatcttcggttgcttcgctggcgggtggcttgcagatcgtgttggtcggatcaacggcctactcgctgggtcattatttgcgctgatcggtggcgcgctgcaggcgggcgctcagaattccaacttcatgctgtgtgctagggtggttacagggattgggaccgggggtgagaatggatccctgctagtcttgcctcggggctggaaggagctacgattttaatttgtcatttcacagccttgactgggattaccccggtgttggtgtctgagacctcttctgcgaaccaccgcggcggctttctgggctatgtgttcattgccaattgtgagtcgttgattcgcgatatccactgtgggggccattgctgacatgcatgaacttcaagatctaggtatatccatggcatattggatctccttcggcctcgctttcgtcgataacggttactcggacgtacgatggcgcttcctcctcgcctttcagtgtttcccggcactcatactagtttcctttatcaaaatgttaccggatagccctcgctatctggcctcggtggggcggaatgatgaggctcgagacctcttgaatcgtattcgcaaagatcgggcatcgcaggaagatatcgaccgagaataccttgagattatagtgaccgcacagggaagcaagcgcagctcgcccactgaatttggaatgatcctaattggaaaaagtgaaaaaccagggctaaatcttggtcgacgagcttggttgtgtgtttggcttcagattatggcgtcctggacgggtattacggtgagctacggcgctcacaatcggtcccttggacaattattggggtactaatagtaattgtaggctgtgactgcctattccccgacactgcttgctcaagcaggctatagtgatataaagcaaaacggtcttgctggaggaatcaacacaattggaattataggtaccattatcagtgctcaaataatcgatcgattaggccgacgggtgtgtctgatgggcggagcagctattttatctgcagtcaacttaattgtgattatttcttctgccgctcgaagtgctttctcctgacaattttataggctggagctgtttatgaaggttccctgcataatcctgaaaaagcatctcaatttgcgcctggtgctgtgaccatgctctttttgttcaatttggggtaagtctgaaatgcgacacttcttgtcatatgtactaaagtgtaaccagttatgctgctacctggggtacggtcgctttcttgattcccactgagatattccccagtgatctacgcgcccaaggcaatggctttggtattacagggtgggcaattggggttggtatgaccactttagtcaacccgatcatgtttaatgtcatgactgtaagcttccccgacttcacacttgaattgaaatactgacgaccgcttagagccgtacatactttttgtttgctggccttaacctcatctggatcccgatcgtctacctatgtaggtttttgatctcgtattcatccacttttagttctgagatctaacatgattttcttcgcagtctaccctgaaactcgcgaccgctctctcgagtccatcgacgctcttttttcgacgtccagtccattctactggaagatggaacaagcctataaactccatggcgatgtcctcgccgaacacggagtaaatatgagtgaggtctctcagtggcggcaagacacaaactgaacttgcgactgtcaatttacgttataccatatagagccttgatcgtgtcacctacgcttgcacatgtataacatcatgtacccgatgttgttaccccgcacttaatgtattatatagaggttgtattcacacctttctatttgtttttcatttctttctcacttattactggtaggtcatgacttttatataaaccacatttagtcgaaatctatatatacatgccgtcttggtaaacagtatatacatgatattctccaatttctatgatctgcagcattataaattagtataattacatcttctcgcgatgattgccgaaacatccaccgcattcgatcccggcatcaacctgaaatgacacgctgctgagtcagcttttgtggcttgtaactccaatgccgactttgatcctcttcatttctaggattcaattgcgcatctatgtcatcggagaaatttactgcttcagcttgatcgcaatttttttttgcctttttcccattctgcacaggcctaccccacgatttagtacacgcgacccgtgtctctgtgcagaccccgaaacccgtttctcgaccgaagctcccgaggtcggggcccacgaattgtcacccgcttccttgcgcctgagcccaattcccgaggttggaatgaactaatgaattgaatgtcgcaaaaaccccgaaagcttcaacgcgtctccaaagcctgtaagatccccacgttgaattgtatactttcctcgcgcttggcggcaatatccccccccgaactgtactagaaagcttggagctcatgttgcatccataggcgacttctgcaacagacgcagcattaaatgcggcaggagtgcagacccgctaggcagatgtcagaattgtgcggattttgacgtcccgtgcacctttgatcgccccgcgaagcgccggggcgtcaaggctggcaccagggcttctatgcgagagactccgttggtagaaacgcctgcccccgagaatgtcctccctgtaccgcctacagggcggatgtcaaactcctctgtgtctaggagctacagcgagtccgcccaccgcccgtcattgactggggacccatggtctaccttcaatgttggtggcgtggcaacggaagtgtatgatgatgatagcgcattgcgaaactcatggaatgcatttgccattgccagtgatcgtcaaatccgaaatctcgtgcaggtatacttcgagattgtgtatccaatgtacgaatcgaccttactgccctttcccttttctatggctgataaattcgcagattcccgcttttccacaagcaatcttttattgaaagagttaataaccaagagcacctccgaaatccggggttgtttgcctctacaatggctgtctgtgcgttagtttcgggacgcgcccgagacggcgcattgttcactaatagatggcatcgcgaagaacttgccgaacctccatctgaggcattttatgctgcagcgaaagattctattccccgagaccttgcagcggcaagaggcattaactatatgcgtgcatgcgccattctcgcaattgccagcattcaaaatggccagatcaagaatatgcaaaagttttccggcatgtaccatacacttaccagtatggagggccttcatgatgagaagctttggccgaaaaacttgagtcctatcgaaatcgaggagcggcgaagactagtatgcattcctttatcttatggttacggttcccgctaacttaatgctatgaagttctggtctatctacacgttggatatttattctaccatcgtatggggaggcgtgattcgatatcgcgaagcgcattctctggtaagatatccgagtgaggttgacgatgagcttatcacactacacggctacgggatgcctcccgtgtctccggactcgggcgatgtgaccgttgtatcacggcagcctgtagcatggcttcggggctggaactttacgacagacctatatcgaattctagaatacgtcgtcgacggcaatcggcgtcgtttctcgtcagccaacagaacctcacaggtgtggtctctgttcactccggcatccatgtcagaaccagcagtcatggagagggtactatccatgtacgccgcactaccgtcgcaatttaaagaaacaccacccactacaggcgacatggccaaggacctgttcgggttccaatctgccaacatccaggcaacactgcagctcctccggatggtgcttttgtcagcggaagagcttggcgtagaccgcaaatgtgacgtggccggggaacttctcagtgtcttcagcaacgttcccgtggagtatttgaaagccatcagctcccctttagtatgttcatcattgcttttccagcccccatttgactaaccgctcccagctccatcatcttggcggaatcggctatatcctcggttctgtaatggaaggaagtttatcagaagcatcctatcaacgcgtccgcacgttgttgtaagtttttttacacatcccaggccaattgcccaaattaataagctcttacagactcgaaatggctgacctcctcggtcgcctcgagacaggtctccagcgtgccgccggcgccagccaacgccttcgatcgcaagtagacagaatcgacggctacatgcgcacctcccggctagtcaatctcacattgcaacacccacaccctcaacataacgcaatcccgatcgataataaacgcgagatgcctttcccacccacaacgtacattcctcccagtggcccagtcccggcagtcggcccaccgacgggaataggtgggcagatgatgcagttccagctaccgccggagttgttgtcggattggccgtggccaatggatggggctcattcggatgggttccttccgctggcgtttgaataatttattcggttgttgctgggtgcatttgtgcgagttggaggccacatgtttgatgattgcatagaatagaaggagtgtaattaatcgtctgttttatatttatactagcggtaatcgagcagaactcacgaattgtggtgttcgttaccctttcgtcctatacttgctttaatcgtccattttgtctctttcatatgttcgttctcaggttcaattatcgatctaaggtgcttctgcgccctttgaggtattaactacacaggtccgactttcggacgattacatgactcttggcctcttaagacacatatagtagtactaagcaatcttttaacagataaacctcattatcaaaagtctatttagattgagtggagggcgtccattttgtggagaatgctaattgagaaagtttgatgtacacagtttctcttacataccacagcaatcttgactcgaagtatatacggagtacgtaattccattatgagaaatatataaaaaagtactgccgatcactggccttgacctgtaggaacaccagcatcatgtacaacatagtggtcaagcccccgctagctcaaaatgcgggggtatacttatggcttcggccctcccaaggtaagcgggaatatcataattcgtacttggccaaaggtcagtggaaccgacagagagtttgttgatcttggccatggcccgatcggacattttgaactctttcagcctagtctccagtagtccaccccacaaaggcgtgttgaggcattcatattaacttctcttatcaaaaagtcttagttggtcattgagctatggcctctggacaattcccatcgaataacctgataagcttatcacttggcagatcttcaaggtttagcatcgccttctcctcccccttttgggataaccccgaagacattcgctgatttgaagttgatatcttgatacatctcttatcagcggtgtctggagtcggcccacggtcttggcccacgttcttggcggtgttagagatgatcaacatcgatgccgtctatctatcaacgtcgttggtgccaatcctgaccccaaggtcagtgcgcatataaagagtcatgtcccgcgcctctggacttggagtacattccaggctcaagtagcattccgccatggagaagaaagtctttacaaatgtttccgccgaggatgctagcacaggcgctgttttaccctaccgggagacaaagcgcggtctatcatcccgacatgtgcaactaatggccattggaggctcaatcggtactgggctgttcgtcggtatcgggtcctacctgcgggatgccggcccgctgtcactgtttctggggtatcttgtttgggggtgcctcttcatcttgcctgtcaatctgtgtgttggggaaatggccgcataccttcccattcgtgggtcgatctttgagctcgctgcccggtttatcgacccggcatttggatttgctatgtaagtcttttcgcgcctgaaccttgctgggctctacgctacagacgctaacccttctaggggctgggtatatttctacggtggtgtaatgctcgtctgtacggagtattctgcagtctcaacaatcatgcaatactggaacacaagcgtcaaccctgccgtctgggtagccatggcaatggttgtttgcacgatgctcaatcttgtctcggtcaaatggtacggcgagagcgagttcatcctagcgtcgaccaagatccttctcctcatcggactcgtcctcctcaccttcatcacaatggttggcggaaaccccaggcacgatgtctatggcttccggaattggaccgatggcgtcatgttcgagtactataccgatggcaccacgggccgatttttaggcttcttctccgtcatggtctatgcagccttctccatcgctggtcctgatctcccagccctagccgcaggagagatccagaacccacgagtgaccatcccccgagtcgtgaagatgactttctatcgtatcgtgggattctatgtcatcggagtcctagctgtcaccatcatctgcagccccaacgacccacgtctcatttccgcaattagtgacggtgctgctggctccgctgcttcgccttgggtcatcggaatccaaaaccttggcatcaagggcctgcccgatctgatcaacttcttgattctgctatcgggctggtcatgtggcaatgcctacctttacagctccagccgaacactctattccctcgctcgcgatggccaagcaccgaagttccttttgaaatgtactgcatccggcatccccataaactgtgtcctcacggtctcggttttgtcttgcatcaccttcctcgtggccagtacctcttccgtcgaggtcttcttctggttcgttgatttgaccaccatcgccttcgttctcacctacacgggcatggtctgtgtcttcatcgcctggtaccgcgccctgaaagcacaaggaatcgaccgcaagacgttcgttccttgggctgcaccatggcagccatacggcgccattctcgctgtcattatcggctccacgaccgccatatgtaatggcttctctgtcttcaagcctttcagtgtgcaaggcttcatcacctcgtacttcggtctagcgttctgggtcgtcatgtttgtcttctggaaggtgtatcaccggagttcgtttgtgaaagttgcagaggcagatttgtactctggaaaggcggagatcgatgaagagtgcaagatctgggaagaaggtggatgggccgaacggcggaaggcggagctggctcagatgcattgggtccggcgaatttgggagaaaatgtggtgattcactgtatacttggtgcttttttgtacatataccatctatcttattcattgaattatgttttcatttgatgtttgctatttccagagcctataaagactaaatggtcaccgagatagaatagcagattatcacagtcggcgagcgtagatagttgtaggataaactccgatttcaacccttagagtcccaatgtctcttttccatgtctaaatagaggcatataagagatgaagtatgtttcaaggttgtacctctcataaactagacgctctgattggccagtgcaggtgatgcttaagggcacgcaccggtggggaccgggactggaaaagaaaagttgcccggttcacctgggcaagcttctccagacctgcgaacaacatcaattccattatgtccaccatgtcaactcgctccgcctggcgagctttgcactatagtgcaaagcgtcgcgctttccaaccctctactccgtaccgttgtttctcctgtgccaaccgtgtccaggagcagaagccagagaatgaccgcatgacacacttcggcttcacgaatgtgcccgaggcagagaaggagattcgaggtaagaatcataatcaccatcttacccaattgaccatctcaatgcaaccaaacccgaacccatacctgaccaacatccccctacagtcggcgccgtcttcagctccgtggcagcctcctacgaccgcatgaacgacctaatgtccctcggcatccaccgcctgtggaaagaccacttcgtgcgatccctgaacccaggctcatgcctgcccgccctgaccgccgaccagcgcggctggaacatcttggacatcgccggcgggaccggcgacatcgccttccgcatgctggaccacgccacgaacgtcaaccacgacatggagacccgcgtgacgatcagcgacatcaacgccgacatgctggccgagggccgcaagcgctccctcgacacgccctactacaacacgtcgcgactggacttcgtcgaggccaacgctgagcacatgccgcatatccccgacgcctcggtggatctctacactgttgttttcggaatccggaactttacggataaacaggctgcgctgaatgaggcgtatcgtgtcctcaagcccggtggtgtctttgcttgcatggagttcagtaaggtcgataacccgattctggatggcatttataagcgttggaactttggtgccatcccccttattggtcaggttgtggcgggtgatcgtgatagctatcagtatctcgtggagagtattgagcgcttccctagccaggaggagttcaggggtatgattcagaaggctgggtttatgattcctggtcagggctttgagaaccttacgggtggtattgctgctatccataagggtattaagccgattgttaaggcttgattgcggacgattgatgtgtgttctgtactatatagacccgggactttgcatactgattgtattactatgagaaatatcattggcgttgatttgcatggtgtatgaacagccttggctgtgaggctcaggcttcggttgtaaatgtgcatctaaaaatgtatgtataaacaaagtgggcgtaacatcgtcaaccgaatgcatgataatgcgaacgatatgtaaaaatcaggtgtgtatatccaagaaagaaaaagaaaagaggacgcttttcagtcatgtcatccatccaatagatcctctgcctccatcactcctaagaaactgtcgggagaggccatatccttcacgacagcaacgacagagactgggtctggtccattttgcgattcacaaatagtacgccgaatctcagccagaggtgtcgagtctggcaccaagagccatttgctttggggtacaacgaatgaagtaccggggttcttggctataacctcggacacacgcacatccatatctccaccaggagaaagaagagcccgaatgcgccgcggagggattatttcggacgaagataacaacacccacgatttagcgtttgggtgctggatggctgtgagaaggatatcgagaagtctgacatcgtcaggcgactgcgatgacgcagaagcagtggggatttgatcgagcgaaaccagcatatctcgacaaatgacgcgctgttccggtggcgcctgtaaattgaaaggagggatcgatggggtgatttcctcccacggaagcgacacagacgaggttggagagtcaaacatcctcgttgacatgccgctcgacggcgtggttagcggtgtctctgccgccgccgctccaatagcaccaccaggatggaacccccggaatacctctgcaggactcttccctgttgcactgtgcagcttccgggccgtagcaatagccagcgcatcgccgagcgccaaggccaccgtcgtggacgatgtgggcgcgcacacaccgaaagaagactcttcgtcctcgtggatcggggccggtaaaagaatacccattcccgcagggccatgcaacgagagaagcggacatgtcgccggatgtgtatgcgacgtaagagcaatcaccgggacaggagcggggagatgcgggagcagcgataaaagttccgccgagcgaccagagaaggatatgagaagaattgtatcattctggataaaccaggtcagtatgaaagtttccaatgtcttatcacaagccaagcgatcgcgattgtaatgcgattataattcaaaagcacatctgtaggcgcaggcgcaggtgggcttaccggccgaaccaatcccaggtcgccatgcaaggcttcagtcggatgcaggaacgcgctatatacgcccaaactattcatcgtcgcctcgattttgcgtccgaccttcccacttttcccaaccccgcaaaccaccagtttcccaccctcgcgcacgctccgcgcaatctgatccacagcgcgggcgagatcgtgctgcgcccgcgcatcggtctggtagatgtgctcgaggtgggcgagagctgctcgctcggttgagatcacatggattgctgtcaccaccgacgagacatcttttggcgctgaaggatcggaggaattaggaggggtgagaggccacgagggttcgtgggcgggttcgaatattgacatggcgggtgcttcttgatatctatagcataatggctagaagtaaaaggaatttatgagtgaagtggtctcttcgcacccctgggcgccggttaacttgcgggggccgatccaagatcagtcgataacggaaggtaacagtgggcgatcggagatcggtgttttctcgtgtgagaccggggattacatacatcttttgcgtggcgatttgacagattactatgctgcaacgtacccctttctaatcttgatttcgtgccaatgtccatagctccgtctaaacccgtctggcaaaatggtgtcattttatgctataatggtgaatgtggaggccatacttgcctattggagtatttccgaggccgaggcataagagaacctaaaatattagtttgaacggattttgagcaatggaggtctattcaatcctcgtatgtatagagggtataaccaaaaaaaggagagaaagcaagccccgaaaatagtatttacatgccgttggccgcggggataattgcaagactctcccgctgatagtagcttctagcaagcgcagagaccatatttagaactcggaaatactccccaaactccaacaaaaaaaaacatcatctgtcgcacacgagaagacagaaggcaggggtatcgcatcaggatgtcgcgtcgctaggggtcattatgagtatgcctcaataggcagtagtaaatcatcgtatcatccttgtcgaccctcctgtttgtctttacccttctctgccgtgccatcatcctcatatagatgatgctgctcaatgtaatgaatgactggaactgggatgagataacgcacactcatctcacgtcgcaagaagagtcgaatctttgtgctgctaacatcattctgaatgagctgctggatgacatggatattgtctttccagggctgcaagctggccagggcttcatcgatatcggtgccactgcgctccacaatgaaagactgaaaggtgtattagcgacccatttctcgagcgcaggatgaaccgttctggatgttggaataaacttacgccatattttcctaaaatatgatccagatccttctcactccacacaccaggtgtggacatggtatggatcagatccgcaccggctaacagagcaatgcgaacgggcttccgggttccgtttccggcgtccacacccttacggacctcattgatttcatgatcaaaatggtccagcaccacagctgttggctgataggccttctgaatcggttcccatgtgtccaccatcaaccagtcggaggtttgatcgactgcaagttggcacatcgcaaccctatagatgaatctccgttagctccgaatagattgaataggatggaggtagaatcgcctaccgatcctccgcactggccaagccggctttacgataggcatccgacaccggcgataggtatcctccaatgatttcaaagtccgtgctgaatctgacgtgatcggcagccatttcgaacattcggaggtgtaaataggtaattggggagaaggaaccacaagcaaccagcaggagaggggtcttttctgggtctttcatcgtccgcctgaggcgatactctgggaaggtgtagtggtccatggaggcgggggtagtgtcggcgggtatctggtggacatcatcgctctgcccgccgaccatatcggctgccatggagagatagtgaatagaggaatatactagaagatcttgaattccggggaaggcaaaacggtatcggagaaaggcgggggagatgagaagtgaggatgagtttctgtgaattgcgaatggggggcgaaccgaaggcggcaagagaatgcgccggagaaggcgaacggaggtgaaaggtgaaagacgaaagatggaagaagtgaaatgtcgttcttttttcctcgtttcttcgcccttttctttttgaatatcacgttctagccctagagtttccccgtgattaataagatggctcggtgagtcaatccagttctactcggtgcgtctccgcgatccggatcgatcgccgttatattccactttgggggttcataataataatgaagagcgaggtataaattcagtttgataaggttatttgagctctcaaggtccttcattcttacctataacataggtacggagtggttcggttttatcgagcactatatatacatcaaggtactccgatggagtgagtatattaataaacgtctttgtctgtattcaaataactggatcatactaaatacaatagatgtaccatataaaaaaagatatacaatggacccttgagatattattccttgtgatattccttgccatttgtactgtcaggtctcagaccccctctatgcccgatatccaggcaagatgcaaataaggaaaccaagagagccatttagaagtaatcgtgcaataaagtattataataagtagcacgtataataggtaatgtatacagtatgtccaagtaactatacaaggacctggttagatcatcgaaatgttgcacttccgccgcctgacgctcgccgaatcccatcaaccaccacgtcaaaccctccttttctttttcccctttctttttaacccccccaccatctgaaaaattatcttctgtgtgaccggaattggtaaatcgttcttttcttgagatctcctagccccaacggcaacagtaacagctacccgaaacatcgttctcgccagccctctcggctagccttcgataggtggatggcgggttaacaacggtgacgactactcaatcgagattcctatacccgataacttatggccaggcaaaggccttccgccaaccgccaggaccctctcgaggattatcccgtctcccccgcaggcacttcggcctcttcttccctgaggtagtttcccattttcttcgccttcacaagtacactggttgaggttcagactcatattccgtggaccctcactgggaatctgttgatccctgagtgctcgtaccccccaatctgtcccctggattgttaagtggatgctccgcagtttcatcgggatccatcacttctgcatttctagattcgtcatctgtctacccaactatctgcctatcgctttgacccatcccggacttctttttctgtctttttctttcttcagaccctaatatcatcacgcataatctaaaacaaaagaccactttctcatgtcatccagaataactcgctcctccgcgagactcgccacagaccctccacctgctgagtccggtacaccgcttcaaacacctggctctacctcatcccggaaacgcaaggcatcctcccgccacgaccgacaagcagacgccccgatacagccagcaccggcatcgccccaaaggaaaaccaagcgaccgcggactgcagcatctcaaacagctccatctactggtcctgttcctgctgcaccccgtcgaggagcccgcagccgtacagccatgtcacaaccggggtaggtgatgatgcacattgatggataagaactagggctaacctcatctcagaccttcatctcgaccgtcggaggaatcatcgaaatcgacgacctccccacaaccatcgaggcgaaagtcaagtcggaacggtgagttttatggatgacaatcggccgtgtcacacaaatttgtatctgatgtgctagttactgatcccttctctttatttatagaccgacccgcgacgacacagtccccgccgccccgacgcccgaagaagcgttcgggcaagtcaaatcccgatgttttgatgagagatgcagaggaggaaatcgaggaggaagagcatcaggaagaacaacaaggatctcaaacgggagagagcaacgatggcaccaatccctcggcgttcggtgatgatgatatggatccgttccacagcagcctattcggtggcagaggccccatgggactccagagcactttacgtgccctcactggcatgatgagtggcatgtcatcacgtcttcgagatattctcaccaacttgagagcgaaggatgatccatctctccaattgatcgccttgcaagagctgtcagatctcttgcttgtatcgaacgaggataacctgtctggtcaattttcgccggacccgtatgtgaaggagctcgtgactttgatgcagccaaatcagtttggcgaagaaaatcccgagattatgcttcttgcatgtcgctctcttgcgaatctaatggaggccctacggggctccgtagctaatgttgtatatggtggtgctgtacccatcctctgccaaaagctgctcgatatacagttcatcgatctagctgagcaggctttgagtacattggccaagatttcagtcgacttcccagcctcaatcgtgcgagaaggtggattgaccgcatgcctcacgtatctggatttcttcccaaccagtactcaacgaacagcagttagtacggccgctaactgctgtcgtaacctccctcatgactcgttccctgtggtgcgggatgtaatgcccaccctactcaacgtcctctctagcaatgatcctaaggtcgtggagcaagggtgcctatgcgtatcacggattgtcgagagcttcaagcaccgaccggagaacctggaggagctgattgagcctgcaatgctcaaagctatccttcggcttctactgccaggaacaacaaacctgatcgggcctcatatccatacgcaattccttagggtattggcaatcgtatcgagaacaagcccacgattgtcaaatgagcttctcaagatggatgtagtggatacgctttaccaaattttgaccggcgtgtcaccaccgcaggatgtggataacacggccgttaagatggacagcgtgctagtcatgcaagcattgattcatcggccccgtgaacaagtatatgaaactctcaatgtcgtctgcgagctattgccaggcgttccaagccgcgatgcctcaaaaaccgacaacctcctaagctcatactttgatagccacatgtccattggactgagatctcccaaatctaaagagacagtggaggaaaggcggtccttgctcgttaattgcaagactgagcttaagcgttttgcgatgattctgttcccaactttgaccgatgcctactcgagcacggtcaatctgcatgtccgccagaaggtcctgattgcacagctgaagatgctgcatatccttgagccttctttgatcgaagacgccctgcgcacagtcccttacgcttcgtttttggctgccattctgtcccaaaaagaccacccttctctcgtatctttagctctacgctgcgctgagctactgttccagcggcttgaacatgtttatcagcatcaattccaccgtgaaggagtgatctcggcgatcatcaaactatccgaaggctctttgtcaggagaccaggagaacatcgattcatccgatccctcacgtataaacacgagcacagattcatcgcgtggtgctaatcaaattgttggagagactggatctggcggagatgatgaggatgaagacgatgaacccgatgactttgacgacgatgatggcgaggatgatgaccaagatgacatgtctgattccgaagacgacttcatggccggcccacgcagtcgacaaaagatggacaatgcgctcaacgacgtagttatccaagatgcccaagctttcctcgaggtatatgaagcaagccacggtgaaaccgttcgagcggaggctttgaggatcttgacagcactgaaatccctcgcctccgaaataaaatcacgctattcccgtggcggtgagggtggtcttcccttatttaaacagctcgcgtcctactttgacggagacgccttggagggcattaccagctcagaattgctcaactccggcattatagacgttcttctgtgtgtccttggtaactttcaatcgccctctatccgcgatgctagagccgacttcctgcgggcgtttatgggtgtttcaatctcggacaaggctcaaagccagagcaccgccacgacacctttcagcgtacttatccgcaagttgcaagacctgcttagtaggacggaacatttcgaagtccttaccattagtcacaattcgctagagaatacccgcagcaacgccgcctacatgctgagcaaacagctccgactcaagctggttgccgacgaagggtccgaagttcctcgtccttatcgcaacatcatggtgtcaatccatgccattgctacatttaaggccttggatgatttccttcatccccgaatcgccgtggcggaaaaacctcgcccctcacgaacaagggactcaattctctcacaaattgccaatgcatcccgacttcgtgaacagctggcttctgggtctgggatgagcctcccaaatcccacagggggtctccagggcactatgaccgatcccacggatggtgtctatgattcttccaccgatcacccgcatcatcatcagtccaatcggattcaagaagatgaagatgaagaggatgaggaaccccttgaatgcgccgatgaaaggcaactgaccgacgaagaagaaggcggcgaagaagatgagggcgaccaactcaatgccattgttgatgatctcgatgaggatatggaaaatgatgatatctctgacccctcggcagtcaacatggaggtggcatcctcgggcaaggtcacggctcgcaaggaagatggtacccgaattgggacaccctcccagaccgctgcatccaagccttcatcgtcagctcctgccgctctccctagtcacacgcgcaacagttctctcgccactgccgggcgcccgttctcatcgtatgccgctgcaatggcctcggtgccccaggactggcaccttgagtttttcgtagatggcaagcccgttactaatgagacaactatctaccgtggtgttcatcacgaccgtgaggacttggacgagagtagtgccaagaacgtctggtcgggagtccacactatcacatttaagcgcgttcctggtcctccgccgccagagccctcaacccttacaccgaccgtccaggcttcttctgagggtgatgcccttgagatcccggcctctctcgacaaagacccaacaacttcatctatcattcgcctgcttcgtgttttgcacgaaatgaacgcaacgattgatgatatcttgaccgataccaaagactccgccaccatcacctcggagcccttggctcaattcattaacacgaagctcaccgccaagatcaaccgccaactcgaggagccgttgattgtggcaagcgattgccttccaagttggagcgaagacttagcaaggcttttttccttcttgttcccattcgagacaaggcatctattcctgcagtcaactgcatttggctactcacgggcgatgatgagatggcaaaattctcaaagtggtgaagacagccgacgggacttgcgccgcgatgatcgcccattccttggccggctgcagcgacaaaaagtgcgcatctctcgttctcgcatccttgattctgcattaaaggtcatggaactctatggatcttcccccagcattctcgaggttgaatatttcgaggaagttggtactggattaggaccgacccttgaattctactctactgtttctagggagttctcaaagaagaagcttaagatctggagagacacggacggaagctctaccacagaatatgcatttggcaagtctggtctgttcccagcgccgatgagtgacgaacaagcatcccaagatatcgggaagaggcaattaaacatcttcaaggtcctagggaagtttgtggctcgctcgatgcttgactccaggatcatcgacatttcgttcaatccagcattcttccgtatcgcggatactctgtcatcagtggcaccatccctaggcaccgtcaagctggttgaccacgacctggcgaagtccttggtcatgctcaaagaatttgtcaatgccaaaaacgtcattgaggcaaaccagtcgctttcgccagcccttaaatccgaggccgtgcaaaacatcacggtccacggtgccagtgttgacgatctgggcttggacttcactctacctggatatcctgcgattgagttgatctctgatggcgccaatgtgccgttgacaatcgaaaatattgacacttacatcgaacgggtcatcgacatgaccttgggtagcggtgtccggcgtcaggtggatgccttccgggctgggttctcacaagtcttccccttctcctccctttgtgctttcactccaagtgagctcgttatgcttttcggacaagcggacgaggattggtctatcgagaccttaatggactccatcaaagccgatcacgggttcaacatggacagtcggagtgtgcgcaacctgctgcaaactatgagcgaactggacaaccagcaacgccgagatttccttcagtttgtcactggtagccccaagctccccattggaggtatgtttatttcatttttctccacataaaatcccactaacacaaactcaaatataggtttcaagagtctcacgccgatcttcactgtcgtgtgccgcccaagcgaacatccatatacaccagacgactacctccccagtgtgatgacatgcgtcaactacctgaagttgccggactatagcgacctggacgtactcaagaagcgcctctcagttgccatcaaagaaggccaaggagctttccatctttcttagacctgtggacagctgttcccactcaaaacttccaccatctcctcttctctctcttctctttgctggcttccgctttttttgaccagaaattattcacgatgcgacgacgtgcgacttgtttctacttcgttcctctccaattcccaagttttcggacgggctgtttcgctgttcttgtcctttccttcttcatatgccatctgggtcgaaaggcgtcatggcgggggctccttacgatagtgatattagatagcaatgatcactttctaccaaaagtctagtttttccggtgtagatagtcttatattgaggtaacatttggtacaaatgtactgtagtacaaagactagtccaatgaaacatggtgaggacgtagggatcaattgccccattaaatataatggctatctcacattcctccgagatcaccgatggatcacccgtggatatattcatcagactgccgtgttgaatgaaataaaaccatccctatgccatggctgcccctcgggagattaccatcgaatgtctcaacggccgttgggttctggtaatgatactattccccttgaagatgctatattctaatcgattactgtatacagaataaggacctgaccagcgaggcagaccctattctaaaattggttcgaaataatctgtttctacaactttaaatcctaagctgatcacgtaccgtccacagcaaaaagtaccttggttgctccgcaaggcattcggattcgcaacaatatacatccaaatctcccaataccaaacaccagcatccgaaacaagccaaccatctacgagtatcgactttacccagacagccacagcagggctggccgcaaccaaagaagaacgcgtcttggattggaaagtattagaccacgaggactacttcttcggcgaggtcaaagcacagagtgaattcgtccacggtgttattgacgcaggtggaatcataaggcctgaatttgagcttcagacggccatgtctaatgaccagattaagcaatacttacgaggtgagatccaggaggatgggagtaaatctaccggttttctagttgaggactggagtgggatgtctgaggaggggcctggtctttgggtacatacctttgagcggaatgttaagtctggctggacagctgagcaggtcagtatttatagttattgttggatgatttaaatgaaactagaggctaactgacttgggctgcagatttggggatttgagatgtttggggactcgcgatacttctctcgtcgaggggtgatcatgacgacgaggggagaatatatgtgtgggagaattgtgtttgatttcgtgagtacttaatgagcagtcttcgagaatcaagggggaaattaggaatcaatcattctacttatctatctatcactgactttatgaatctaaaactctataactatgtataacgcagggacatgatatcaactttccacacaaagacactctagctcgaataaaccgacaccatagactgtgaaaactgttagctaaatctaccacatacgggtagaataaaggggaactcacgtctgcaaacttgggctcaataaacaaagccttagcctcagcaaccattaccgcgccttcactgtcctcatgcagcagactagcatcaggaacaatggtatgcccgtccgcagacaggggcacggtcaaaggaagataagtcatgcggccctcaacccaggccttcctgccctcgaccttaaccgtctttgtgcgcatcacatacattcggtcgggaagagctggctttcggaaatccacattaagattcgccgtcatgcccagcccgctggggaaagccgcagagacacagcgcgcaaacacctcatcaaaaagaacagtgagaagaccaccatggacaaagccagggtgaccacagacgtcctggccgatatggaatactgatacaacgctgctggctcggtcggcactgtcggtccctgtcccagacttgccggtcgagagccacatatatggtgcgaatgcaagcttgcctacaccagtcaagctgccgcccacgaagtgatgctgtctaaggtgtggcgggattgcaagatggggacgtgtttccttgtaggtgctctgggttccgcgcaatttctggacgagagggacatgggaaacaagtttgtcgaggcctgtccgttcgttgtgcaatgactgggtctgagacagtaatggggatccgtcggtttggctagggagtgcttggtcatgaacgaccgccgaccggtttgggtgttgttcatggagacgggcaataggcgccgcaggcgagtatgttctgaatgctgaaaggggttgcgaccggaacagccgacgcgctgtttgtgaaatgtgcgacattctgggaagtatgtatgaagttgatgttgactgtagtgatgcatgttagaaggggatttcgagggacttgttagaatgccgaaccgaggcacggcacggagtacgtacatactgcagagcaggctcgggttattcggctcgtgagtttgtcgatattcctagtgttgatatgtagtttggatcaaggctaggtgatatatgaagtataccacacttggacttttgcagtgacgatgatggcaagaagaatgtttcgtaatcttaagaatagacccgccactctctggattagtcccgtttctgtttccagggtttttcttatctttttttaaggccgattttcccctgctggaaccaacagtggggctcaaagccttggaacagccgatgatcggaccgtaatgccaagagatttagttcggtatgccgagaactataagaagccgtagatccatgtcagtatattattcaacgtaattcaacggagaccgaagactgaagatcaaagggtgtagtattgttatattagcatagtatggtggttttcaatgggggtccttcctcgttggggggtcaacatgcagcacagaaaaactgttgtctcatggcagcaatcattctcgtcatctccccttctctttttcaatcaaagatcatcgtcatccagcttggatgcagcctcttctcttgtattagccttcatctcaatattgactctcaatcttatcatctcaagatctcaagatggtagacgaaactaacctctcttcttctgacgaggattctggccccgagactgtcagcaaccccttcggctctggcgtgggtagtatcccccagaccatcaataatcctttcgtttctggtgtgggtaataccccccagactgtcaacaaccctttcggctctggcggggacaatccctcccagataaataatcctcttgcttctgcagtgggcaacatcccccagggcaacaactcttctgtttctggggtgagcaatggcccccagatcaacagacctttccgtactcgctggggtccccctctgatccgccccatcgccatcgaagacggccccgtttcccccaatggaggattgaccaatggtcactcccacgtaaatgaatggcgcgctccccacccaacggacttcaatccgttgtacgccccgcccgacgacgagaccgacgatgaggcagaagccaaccctccacccccaaaccacgaggtggtggatgaattcctcgatgaggacgaggacctcgacgatgcctcagatgaggatgaaggggtctctgccccgtatggcaacagccagggcctggaggccagcctggatgccatcatggcggagggaaatgaggaggatgaggctgacgaggacgcctacctggacgaggtgtaggcaagtaaatgcttacttgaatgcaaggtatacatcacatttccttttctcctaagccccaatcagcttcacttcagtcttactatcacttcaaactcatattcgtttcaactcacattcgcttcattgctaactcatttccttgtcatctaggtgctggtgagggaagcggcgacttcctcatcggcttcctcagccttgcggtcccaccacggctgacctcaagcgtggtgggacacgaatacaatgatgaagtggtagggaggaattgggggggaggaggagattcttgtttgagttggcccgcggaggctgacgatgtacgatttggacggcgacatggggcgtttgctgtgtcactccggtctgcaggatgacactgcactaggttcgctcggcgtagctgtcatgcgggccaggggctactcattgagtagtcccgctgtattgagtatccttccttttgtgttgagcgtgtttgtttttgagctgcgatgatcacttgatcaatatcattttcatttcaactgccccttgcgacactcttattgcaccggagaggcacatcaagactggaatgggctgacaacagcgctgctgtggttcggaagcagggagagcagagtcgagccctcgtgggcccattccgaatgttatgcgcccacaatacgacaatacaatacgataccatacgatgcgatgcgagaacgaattcacgtcgcctttgagttgacattttggagcctgcatgcattgtcctaaactgacttataaagcgcagcaatcaaccaaaggctggctggtattcgcgaatgtaaagcggctgtggcggctgtggcggctccggctctcatgaactcactgcaagcagataaagatagttacttctactctgccggaagtaaatgattaacatctcgcatctctaggagcatagaagaactaatacaaagcggactttgatgctgacctacagtatagaccgaaaagttggatccctagtttaccgactccacaatctgtattccgggaaggccgaatacatggaatatagtccaataaagctattggtgcatttgatactgaccaaacagcttctagaacaaggtaccgtcgccaaagttcaagatgggactacactttgtctccggacgcttagccgctgcaagctcacgacccgctttccaagagcccgcctccaacacctgaggtagagacaattggacaccatccaagcgagcaagaatcttcgtatgcagcacatcgaggagagcaacagtcattgctcgccattccacaatctcatcatcgcccgcaccgaacgaaggcaaactaccacccgaaaggctcaaccctcgctgcagtgcctcgggcttcaattctagcactcccatgtcgacgagcattcctccattgcggtactccggcagaccagttcccagctcagtattggaccatgagactgagagcaggcgagagaacggtaccatcaacgagtaccctagccattgagtcagcttatggaatggttggatgttggagtaggggttcgactccgatccagcctgctgtgcaagtgctcgcaggggccatgcatcgccaatgggctgcccattaacgtgagtacgatcagacggccagatgggaatcaggaggcgctgtagcacgttccaaagatcccggtaatcgagctttccgctctcattggactttgcaatgaggtaatctagattttttgggaactgtttagtgattttcttgatcttatcggtggtatgaacttaccaacaagattgccaggacggccagagggtccaaaaatatctttcaagttcatcaaagactcgccgagtttacggagaatatctgcacgcgcagatactccgatcatgggattggcatcgtcgacctggagtccacgggataagatgtctacattgatatttcgcaatgcatcgcctagcacgagtcagccaatatcgcattgaatataagagcaaacgcttaccattgacggtgtgtttcaccgatgagttctggcccgcaaagtcgccgttgaggaacatgtgcagggccgccaccgcaataccttcgcttcgattcagcgtcagaccactttgtgcctccttgaatttccaaaagtctccagcaccggcatccaaaaggacagagacgaagaaaagatctatcagcctgcgtgtcttttccgtggtgtcacatttctcctcatcccattcagctagaagagtggctatgcggggaaccccgccaacttcgaaatgctgccagcgtccatgaggcggaatcaggtgatatctgtcagggccgaagtcgcgctatgatagagagtgagcttttttatgcttggaattggaagtgtgcgtcctgggtatgtgccagacctacctgaatcagtttaagtacgtagtcggtggcatcttccatgcgttcggggtggtaattgaaatgattcaaccgatcctcttcggctagtttgaggacaatatgggctcttgtacggacggcttctaggcctaatagttcttcaatttggggatccatgttgggagaatggaagaggtgactctgcaggttaagaaacgtgttttatttactccaagccaaagcgggggaacttatgcacttatctatacgtatcgcatttatcttggcgtgtggggctttcctatttgatctgccgccgcttttacgaatactcaggctcagggtcactgagtagatgtcagcacggagatcagtgatcatgctcagtcacgtgtagaatgactgatgctcagtgaatgctcgaggttgcattggatgctgtcagtgatgctcagtgtccaatcagtgaggtaacactattcccagaagggattagcccctatagggtcgtttagtactgatcacctcctacatggtcaatattcgaataagcaagtgtagggggttacttcatgaccattcgctttcgaggctactacatatgttgtacttgatttccaccgttgtttacttcaaaccccactgcgggatcggcgatcgtgcacgggcaccaccgaggtagaaacaccgtcggagagtcggagagaagtcggagtcccactggtcctcgtatcacttggccatgtctctcgagctgtatcacactgcatacaacgccggccagaccactgctgtactaacccatggcgccttggtatctggtctctactgggatctggtgatccccacctcacgtcttactagctcctggtcccagatcttccgggccatggcaagtccgccggtacgccattctcagtggatctcgcagcgcgacagattgtccagctgatctatacatacgcgaatggttcagcgcacattatcggctacagtttggtacttaggttgctatccgcctggcctataccgaaccagatgtggtgaactctgtctttatctcggggtttagaacgttctcttaaacgtcacttacgccgtatattctatatatagcgtgggcgatgatacgtatagagaactacctcggccggtctcttatcagctaggcaatagatggtaccgatatcccacgtattgatactaatgtctgtacccttgacctgtgttgccagattgtattaccagagcatcctacacagtagttatcaccatggcctgcgcgtactctgattgttgtagcgggggttagtgcctacaaaggatagccccggtgatgctgtgaagttggtggcgatcgggagagccgaatgaagagactatcgcgtatacgcacttgaaaatgcgacatccgtggaatcgtctggaaccgcggctctttgcagagactgccacggcgtggtttaaacataaggagcttcccgagggctttgttaagctttagcgtcgggtagacggggtttgaagatacataggagtttatcccagggcttggatccataaactccatatcaggaactgtaataatgacagatccaacagatccaagataaaatagaactgtggatggcaattgtcgggggtgctcagttttacccagtgatcaaaaagcggcaagaggtgagcactaatacggaagggaaaggtcttaaagtgccaggcattatccgcatgcccagcaaactagttatctttaggcaaagtgtcttgaatgccatcgactatcctcggccattgggggatccctttgtcaccgataggttatctgacacatatcggacttccccgataacgttgggctgtgcactttggaagcatttaggagtcaagtatatatcagtaattttggtatagactaataatcaacattgtcatttttacaaccccattgcttcagtaatttccgaattagaatgtcagagggtcaaggtggcccaggaacgcatcgttgccctcaccacggagaagagcatcgatgtcaatgcgaccggccgtaagatacttctcgctaacaccgatgttcactcgctgggaaagttgttgtttaagctccgcacgaagcccggccatttcggtcttgctcacttcgctagcctccttgtcacgtctttcgcggccaccaccacgaccacggcctctgcccttagacggatcgaattcgtcactgtcatactcaacgccgagatcatcggccgcagcgcggagccagttgtcctcggtgttgaccttctctttagcaattgtggagtctgtaattcgcttggcgagagccatgcgggggcggaggcgggcaaccactcggcgatcaatgtcgagagactcgagagcgatcttcttgctaggtccgtcggggtcgccagccttcctcgctttcttagtatggaccttgccggcgagacgggcaacaccgacaacctcctcgggagcacagatgaggatactcttcccggactcaccggcacgagcagtacgaccggatcggtgaacgtaggcgtctgctgtgcggggaacgtggtagtggatgacgcaattgatgcccttgatatccagaccacgggcagcgacgtcggtggcgacaagaattgagcttgggttggcagtaggagatgagaaacgttcgatggaacggagtcgggctttctgggccatatttgagtgaagtgcgaacacaggaagttgaagagcctgcaaaagctgagtgatgcggcggacagcggagatggagtttgtaaacacaattgtgcggttcttgggatagtagagaagaacggagtagagatagagatcctgatcatttgaattagtatcaggatacgagtggtctaaaaagaaagtggcttaccttttccatagcagggcattcgacaattccttccttgagtccaatggccatctgtgactccgggttcacatcgacgaacttaggcttctcttcgcggaaattcagcttcttgagaaggtactccatggacgctttgttgtccaacatatcactacttgcccagcggcttttgcctgctagcttttgttgaagatccttgtggaatgtggccgagaagacaagagtctgcctttgggatggctcctcgtcctcttcttcctggtccatgtctgcaatatctccggcttgatgtttgtctagtgcattaaggatatcttccatctccttgaaatgaccttcactcagcagtctgtccgcctcgtcaacgactaggaactggattttctgcattttgcggatcaatcccgttcctgtacttaggatctcccacactcggccgggagttccaatgacaatatctgcagtggcaagttgtctctgttgcttctgaatagacataccaccggtgataagagcgatccgcgcattagtgtcgggggaattggcaatgagctctccgatatgctttccaagctgatgcgccagctctcgagtgggagatagaatcaatgcaatcggggatttgttcttttcagactgttcggactgttcctcttgttttcctctcttgtccaaataatgttcgataatcggaataccgaatgccaatgttttaccggaacctgtagaggcctttccaacaacatcgtgcccatcgagaatgagaggaatactggctttttgaatggctgacggggagctgaacttcattttcgaaagagctgtaaatgtctctggcgaaagattaaggccatcccaagccgacacgtcgacaccttcgtcctcttcgacatcatccagagcagtgaatgagagcccggccttgatgttccggttctgaccaggtttggactctttagacttttgctccttaggcttttgttctttggactccttcatggctttgttttgctccttcttcttgtccttcttcgacttcttatcttccttcacttgagttgtagtgggagccttctcgatggtaggtgactttttggacgagtcctcatcgctaaaaccaccccattcgtctccgtcatcttcggacgggggtttgataatcgattttgttggcttgccagacttggcctaccacccaaccacagatattagcatttagttcaacatgatcaagcaaaacatgcaatttcataccttgaaatgaacacctccgtcgctctgttttatgatatccacaccctcaatctcttctagtccaaagaaaccttctgcatcatccattcgatctggcatagcaacttctttccagttgaggtcctcaacaccgagagagccatgatcgtcgctcgaagccttgtcagacttgactgccttcttgcgtttgtttgcctcagacacctgggctttggggtcgcgtgctcgcttttgacccattatgaactgagtaattcttgagtattacagtgtgttccggtagacaagtgatctaattacgccgtcggggagaattcgcaaagaaaaaaagcggcagaaattttagtccgcctttagaatcttatcttttcagtccccacgttcgccgcaaaattaacccactttgacagacaattgcgactaagcagacattttttaatatgggtaaatcatccaaggataagcgcgatgcttattatcgtctcgccaaggagcaaaattggcgcgcccgttctgcgttcaaacttatccagattgacgagcgattcgacctattcgagcacgagaacccggacaatgtgacgagagtagtggatttgtgcgctgcacctggaagttggagccaagtactcagccgtgttttgataaagggcgaaagcttcgggcggcgggcatggctcgagaaaaagcggaaagaacaacagggattggagggcgcagagacaacgacgggcgatgacgatgacgataaaatggaatgcgatgagccttcttcgagctctgaattaaagccccgaaaaaatgtcaagatcgtatccatcgatctccaaccaatggcaccgctcgaaggtatcacaacgctcaaagctgatatcacgcacccctctacgatccctcttctcttgcgcgctcttgacccagaagcatacgaacaaccatccacatcctccgattccccacaatctgtcacagaggctatcagacaacctcaccccgttgacctggtcatctccgacggcgccccggatgtaacaggtctacacgacctggacatttatattcaatcacaactcctctacgcagcactcaaccttgctatgggggttctccgaccaggcggcaagttcgtcgccaagatcttccgtggccgcgatgtagaccttctctacgcgcaactgcggaccgtctttgagcgcgtcagcgtcgcgaagccgcgcagtagtcgcgctagtagcttggaggcattcgtggtctgcgaaggcttcattccacccgttactgacagcggggtggtcggtatggccgcactgaaaaatccactcttcggcggagccgcagctccagtagccgtgtcagaagacggcaatgtgggcgtggaagttcgcgatgaaatcgaccaggacacacaaccccggaatactgcggcgcaacccgcgggaattagcactcctgcgcccaaccactctattgaagtccgtcaccttcaaatcacaaaaccacaagaccaggcccaaccccagaaactgtccaacaagttcgcggttgagaatcggtggattccgtcgttcattgcttgtggtgatctttccgcttgggattctgatgcatcatacaccctacctccggactatgttaatctggatcctgttcagccacccactgcaccaccatatcgtcgagcattggaattgaggaaagaaaagggtggtgcgtatggcaagaccaagtatggacccattcgtcatgtttgattgttacgttaaatgagttgcaagcaaaagttgtatgtatagacgacatagacacgacatagcattttcgaaggtcatgctaggaaggctgtcttcgaagcagatacccaaatacattccattgaattatatatacttttaatcaattgaggagagattgattcaagatgttgatattctaaatgcatttttgaagtcttccaaggctggtgcgctagcccaaatcaggatctacatacaatgaggggggaataaaagcaaagatatgccaatcgtgcaaccatgccatgcgaaaaagaaaacaacagagtctaatagacctccaggacatagcgctcgtcgtccttcagcttctcaatctccttgcgagtctcaaccttcttaccgttcctcctggcttcggtggcaatagcctcctccagaacagcggtgacatcgggcacgggccaagtgggaccacacaggtagaaagcaccctcctcacgaatgtaggcctggatgatctcgggtagggtctggcgcatacggtcctggatataaattttctcaggttgatcacgagagaaagcagcgccgagcagagtgatgacaccagcctcctggtaagcctcccactcctcgccgtagcagtactcctcccgctggtgacgagagcccatgtacagcaagacagcgccaatctccttgccctgagccttctcaagggcacggtgctggacgaaggcacggaacggtgcgagaccggtaccaagaccggccatgataataggctgggtggatttgggaggcagcttcatgacgctggacttgacactgacggtgatctgggagccgacttcgaggcggctcaggtagcgggtggccagaccgaagcggtcgcggccgttggggtcgacccagttcacggcgacaatcatcagggccaccgaggtcggggtcactttctggcacgaggcgatcgagtactcacggcgcttgaggggaccgatgatgcggacgatctcgtggaagtcggggtgggcggaggggtactcaagcaggatgtcggcgaaggtgatggtgtcaacttccgcgcgacgcttgaactcagtggcaccgtcaggaccacacagggtgagcaagtcggtcttttccttctcgtcagaagcaaattcagcaagggcctcgtaaaagcgcttgggtgggcgaccaaagatgtcgacgttctggaccagagcctggtagactgtgcggttctccagaacggcagggtcctcacggctgggaacctcgacaatcgcgtccgggtccaagccgtagaacgcaatgaaattcttaacgtcctctggatcgttctcggcatgaataccgagggcctcgccaatatcgtacttcagaccagtctcaccgagatcgaactcgatgtggaagatattacgatcataggtagtaggggtgagacggcggttctccttgacgcggacagtgaaagtcttgtgagcaagatcggggcggagggcatccctcgtgccataagcctccttgaacgcaaggccgcgtaccgcggtctgccagtccttgagaagagtggggggctcagactcgtccttgtcgaaggaaacaaagctgttggcgatgatgtctttggggagctgaacggcatcgcttacgccatcaggctccttccaagactcgggaacctcgatctggcggagcagcttctcgagatctttgattacatcgaacagggcctcggcatgaccggtgatcgggaacagcttctttattgccagtgcttcctgggtagggaaagcgacgcgaatgaacgaagcctggagaacaaaagcgtccagagacgagtcctcgatagcagatgggtcgacgacgaagacggagatgccacgctgggcgacggcttgcttgaagatagcaggaagctttttctccaaatcctcatccttgatgcccggggcattcacaatcaccttggcgttatccttgacagaagccagaacatcaacatcgttgagcagcgagatgttgccaacgtaagtgacgtcggcactagttaccgcgtaaggtgcatcaacaatcttagcactcttgcggatgtcaacgcggatggcaccaccctggacgagattgtcgtgagtcttgctgagggtgacgttgctggccgagtcgacgccaagagcctggctcaaagtctgagcggctgtctcggtaacggaggtgtcaacatcccagaaagtgtattcctgcacagacgcagggtccaacaactgcagcgaagcgttggtttcaccgctgacggtgagaataggctgatcatacacgcgctggaatacagcggcggtggaaataagatcccagcgctgggagcgggggtacttgatctcaacacaagtcgggttgtgatcacggccagtggcgaaagtcaaagaagcaagcacatcttcatagagagcggagtggatgccctcttcctgaacagcttgctcagaggcgacctggccgagaactgcgacagtcttggtggactggggaagaacgcgcaggaactcctcctcgatgaagggacggtagacccggacattcacaacaccgacacggacaccatccttcgcgagagagcgtgcgatttgggcggtcagagtagcctcaacagtgccaaaggcgatcagtacagaggtgggctcggagtgaccgtggtactcaaaggcactgtagtcggttccgagttcaccgttcagggtcttcagcagatccaaaaccttgccttgggcgtcgaggtgacggttgcgggactcatcgagtgtcttgcggacggtctcataggtgtgagtcagtccatccttgtcgaggacatcaatgactcgagtggtatcacggccaacacgaacgccatcatagatgtggatcgaggggaggactgaggcgagcaacgtcgtaaagagagccatgtgctgcgactcatgagcagaaccgctagagactagacccagaccgagatcctcagccagggagagagcagaggcatagtcagagactaggccatcctcgccggcgtagtctacggcggcgacatgtgcagcgactgggctagcgacggaatagagcaaagagagttgctccaatgcggagcgcatgtaagggagggttgctgaagaagcaacgataccctgggggatgtggcgcttcttcagatcaaagtcctgagagaaaaggtagccaagagccatgttgccggcaccctggcgggtttccagagtcttgactgagggagactcgccattggcattagtctcgcccttcaaagtccattccttgagagcagcatcaagatcgaaagtttccggcgagtaggagaagatcttgtcactcagcaagtatgcgacttgctgaatgagtgtctgggctgtaacatatgtcgggccactcaaggccgacagacctggaactgatgaacccatgacttcttcttaacaccggatataggaccgatatttgttaagacaaaaaacaaagaagaaggtggggagaaagagaatgtcccctcttcatggcttggttatagagaaaaaaccccaggtaacttgcccaaagcggttagtgtaaattgcgtgcttgttatcgggcgataagatttttcaaggcggtcaaaagtggcgcccgctttcggagcatcggccgtgcctgaagcccgagattatgtcatgaagtaatgcaccagccacgtgatgtgtattcctgtgcatacttgtgcacggggccgatctaccgcaccgagcctcgggtcaccttaccccagaatgcggagaacccctcataaaatattgatcttgatatgtaaacggcagagtacgcatatatacatagttcaatgcttattttcagctactttttctgataacttatctctttatcgagtcttccatcatggcatataactcaccaaatcccatcccgttctcagagccgccttacattcgtggcctcccttctccctacattacgcctgcccactgccgctttcaacaagcatgtcgtaaatttgcaacagaaaacttgattcagtatgcgttggagtgggagcgtgaaggaacagtccccgagcatgtcttccacacattctgcaagcataatatgctgttgcccaacatgccagccccattacccgtggactggctgaagcgactgggaatccacgatatcatgggtgtcaaggttgaagactgggactatatctacactggaatttactgtgatgaggtacgccatgagcatcagctatctaactacgctttataattgctaggtaattgaccgatggtttgccaatagatggcccgttccggtctcagtggcccctccggctctctgaatgctggcttcgcttttggaattgcaccaatctataaatttggcagtactgagctgcaagagcggttcttgcctgcgctcctcacaggtaagaagcgaggctgcattgctatcacagagcccgaggctggtagtgatgtcgcaaatatcaccacaacagctgtcaagagttccgatggacagcactacatcctgaacggatcaaagaaatggcaagagacaactctacagtaataatagagctatgagctgacaccaataaccaggatcacgaatggtatctggtcggattatgcgaccatggccgtgcgaaccggtggaccaggagccgcgggcctttcggttttggttgtacctctaaagggccaccccggtgtctcaatgcgccgactcaaagtctcaggtcagatcacaggcgggaccacatacattgagctcgacgacgtcaaggttcctgtatcaaacattattggtcaagaaggagacggcatgcgtatcataatgaccaacttcaaccatgagcgacttgttattgccgttggagttactcggcaggctcgtgtggccctttctgcggctttttcatactgcctcaagcgtgaggcttttggaaagacactcatggaccaacccgtggtccgccaccgtctagctaaggcaggcgccgagctggaatccatgtgggcgtggattgagcagatcttgtaccaattggtccatctcagcaaagaggaaggtgaccgccaacttggtggtttgacggccctggctaaagcaaagtctgctatggttttgaatgagtgtgcccaaacagccgtgttgttgtttggggggagtggatttaccaaatctggtcagggtgaattggtcgaaggtatgttcgccggagtattggtatgtacttggaacaagctaactatgcctctagccattcttcgcgatgttcctggtgcccgtattccgggtggatcagaagatgtgctgcttgatttgtctgtgcgtcaattggtcaagctctatcaggctgaagagaagaagttgtcaccagacgccaagatttgatctaatcatacatcaacaattttggagtgtcaactactcggactttttcgcataatatactcgaacttgaatttatgtcattacacagtactgagcaagaaagctagattgtcatttgcactgacatctagagcaactatgcaataagaatagcaaccatcaaccaatactttccttaacagcaagatcgggattaatctttaactcgtcgtttcaatttggactttgatacccgtaaacaactgctcggtggcaattcccacttgcgggcgacaggtttcttcttgctcattaaatctttcagcagggggtacttcttcgccactgacgccactgacaaatttcgtggacattctccgtcaatagtttggtcttcataagccccttgctccaagagtagcgctatcaaggcctcattgatcacatattgcttcacagctttcatttgatttcgggttctcaaaagcttccaaataattttgtttccgggtttaccacggcaacgagtactcgctcctggtttgaaaacaagtttaaagatgtccggattctcaaatttggcacctagtggtctcactcccttatggtttcgtagattaacatcggcgccagacgccaggagcaatcgtacggactcctttgggacttttgggactttctcaatcctagggtctgcttgatggcctagagcaatgtgaaggggagtgtttccttgcgaatcctgtgtgtttggatcagcaccagacgccaagagcaatcttacgaactctgtttgggcttccaaatctccatagaatgcgtaacagcctaaggcaacgtgaagtggagtgtctccgtccaaatcttgtgcgtctaaatcagcgccagaatcgaggcatagactgaacaactccttcgtcgatttccattggcctctaggaatattgtgtaggccagtcgataagttgaaactgaattggaaatttggatttgccccgtgagctagtagtaacttgaccacagcaatagcctcatcatcttccttgtattcccaggattgctgccaggattgccgcccagatttgttataatttgggtacccacgtgccagagcacattgtagaggagaaatacccctcatcgtgtccgcaatttctacctgggcgccatgctggaggagaagtctgctcatgttgtagtctcctagagccgcagcatatcccaaggcggagatatctgttccgatgttgacttgggccccattgcgcagaagaagctccacaatgttcgtacgaccgaaaccgatagcaaggagcaaaggtgtgttggtcagggtataccggggctttattgggatgttcaagtctaggctgttgcgcgatataatgtgctggatattcgattcatatcccctttgtaacagccatcgcagtacatcatttctagtacgtgtgtcttgcttgtaaatggcatgaatcacagcatcatggatcatgcgattgcatcgtagaagtgaaaatatgtatctgtaccatggcagatatgaagcaacaagacagattacttcggagggtaaggagccaagagacatcttgaatgaaactggaactcagtccacacacaacaagtaggacaattgacggaacataagtagttgaggagttacatatcgtgatcatcaattcagttaacccatgtttagccctaaagtttctggagatgatgagcctactatgactcaatgagatacttgtataggtatacttaaccacttattaatcgtctgttgatatctgcttaacacttagtgcatagtggttcttgaacagcatttcctgctcgtttagtaggcgtcctaagtggttaccttctgcacgcattgacgtggccatcaatcatacatacaagtctaacttccaaatctaccttggaatgaagattcagaaaaagtgtatcttatcccatttcgattattgctctttggagagagtatgcactattataacatcaaggcctctgttatcactttacctctctcacttcggtagcacaagaccccggatactgggcatttgggtgaatctggctgttaagaaattggtctaattaaactggtcgtctgggttaataagtaatattaaacattccatcaatagatacaaacttctcaatgttccaaccagcttaattagaaaatgtagctgacgacgcaaaactgcatcatgctttaccccttttagatagccacggctttagagcagaaaatagtccagcaccaggaaggtcaagaggacactggccagagtcatccgtgtagtctggacagacaccgtattcaagaaccaatttgatcatagcatccatctcactgaagtcaggaaacggttcccactcactcaaatcctccaaatcttccgtatcctccaaatcttccgtatcctccaaatcctccaaatacttcaggaagcgctgaagctcgtcggttcttgggtcaaaccaggtggttagcccattccgtatgaggaaattcaggagctgagctccttcttcgccgtggcattggactttggcgcccgcatcgaggagaggctttgctaggtttatgttccatgggaacgacactgcatgaatcaatggcgtactcgattcgtggtctttcaagtggacgtcggctcctcggctcaggagcaacctgaggaatccttcttgtgtcatatcatcacggaatacatgtttgataacgaggtgaaggcaacccccttcctcacaccacaaggagttcacgtctactccgtacttaaggaccaagtgaagatcctcaagtttttctcgaagtatagcgttttcaagcaaaactgtgagctcgtcggggaaaaatttagctccgtgagctataagcaatttcgcaaaggcttcagatcctcgggcgtcgcggtattgggtcctgaaaacacgagatatgaccgacgcccccacatcatccattgcgtgtacatcagcgccaagatgtagcagatactctatgacaccatcatcaagagacccgtaatacagtactgcatcatgaaggagaggggcctcgttcacattggcgccatataaatgcagcacctccaccactgacctgaaatcgtagttgaaggctacttcaggtacgtcgggtgactggagctcacgcttgttgtagcgaccagcctctacccaagccagtaggcccccgtgtcggatagcacgagacagagtgatttgatctcttatcttcgcgcctttttgaaggaggaaaagggtcataaccgcattcccccgccccaccgccacttccaagggggtgtagggcatggtgtcccagggagggtagtcgttgctgaggtaattcacatcggctccatgtttcaaaaggagatctaccatacccaggttatcatcctcgatagccaagactagagctgattttgcttccaatcctatgattaggctccatcttccctcgtatgtcaagcctcggttcagatctactttccaggacaatagatgacgcatcccttgcatagcaccattcattgcacaccaatataaggcaagttcccctggatctgtatcaaggtttcgcttgtaaagatcacgaattaggagatcgtgaagatctctgttggtgcacatcaagccaagcacatctttacacggtagctctgacactatcatgtttatgatttcgagtggtaacgaaaggaggggcattttgaaggtcagtggccgggagcaaactgggcgattgaggatatgaggttgagaggatgataaataaacaaaacacgcgttgggactttatttcatgcacatatccgtgacctatgtgatttttctaactctcatactggataactaatatattgagtgagatctgaatacctgaacttggcctggcagcaaattaagcataattacctgaattagttaattaccattacagagagagtgtaaacctggaaaaattcatgaatttgtatgcccaaagtgtatatagggtcgtcgggccgggttattccgtgctgtaaatagatgccggaaagcgatctacattcaggcactcaggcattcaggcattcaggcattcaggccctagttatgagtatccaatgagagatatgcctggcatactcttgcttatctccaccgtccacacatgtatttactatgcaagacatctctgtatatgtactccatatatagctatatatatgaccttcttctagtaacatttggagtttaaatgatcgatttagcttatgtttcctctggttgtgttaagccaaagttgagcttaccgaatatagcctagctcgatatcgggatgacgaaagacactggcgcctggctggattcgagggtgcgcctcttttgctgtacaaacaacggacatctactctaattacaacttcagatacacaaaaatggtgaacgtcgcattgatcggtggtactggtatggtggtaagtgtaaatcctgcaagcaaagctcctcgatttactggtctcgaaattccccaagccgagcatacccaggctagaacttcagctaaattgcataaccgatagggctctcaaatcctcaccagccttattgccaatcctgttgtaactcgtgtggacaccatctctcgccgtaccccgtcagtcactagcggcgcgcccccagccaaactcaccaactttgtctctagcgataccgccacctggtcaagccagctctcctccctaagcccgacccccagcatcttcttttccgcgtttggaaccacaaaagcagccgcaggcgggttcgataaccaatacaaaatcgagcatgggttgaacgtcgagctggccaaggccgcccacgacgctggcaccaaggtctacgtactgatctccgctaccggcgccaacaaggattcgaactttgcctacccccgcatgaagggcgaaatcgaggaggatatcaagaagcttggctttgagcgcatggtcattctgcgtcctgggctgattgctggtactcgtgaggaaagccggccgtttgaggctggagttcggttcattgcgaattgggctggcaagctgaattccggcctcaaagatggatgggcccaggacgcggatgttattggcaaagctgctgtcaatgctggtcttaaggcactagaaggtgatgttcccgagggcagtgagaaggtttggaccttgtttggcaatgatatcatcaaatatggcaaggaaggctcgtcttaaacgcattgatgcgttcgaataagctatgtatatgcaattattatccgtatggtttgagatttatcacgttatgcggctatgaacaaattgtctggaaccaattacttgatggcattgatcgaaactcaatatgactttattttagaaatgctgacctccctgcataacatgatcatttatcgcctgcggtactataaacaaagaaagcattcaatctcggtatgaaacatgagtcccatcctccttcacatgaatactacgagccttatttggcgtcccgcgggagctggaaaccccacgatcctgattccgaacaggtccgtcctcctccttggtcctccaagcgctggcatccctattggctgggctcatatccagcggactcttcttgccttcttgcctgctttccttttcattggccgcgagttcgctctccggtgctgtgttcgtcgggtcgaatgaagaaggatgtttggccacttcgccgtccgtaccagatttggcagtctctgagcgctccgggttcaaggtttctcggtcgagcgggccctgacccttttcgatctgggaaatcggggttgtgctaaagggcgttcttgttgctgtcggggtggcgagggattgaatagtaggtttggggacctggctccgggtggcttgctggccggctgagataatggttttccacattctgtgagataggaatatatctggagatgttttcaggtgcagattgtagtggttcgtacagatatctcgttgtggttgagcttgggtatcgaaattgcaagatgtatgttgtagtgaagtgaatgagagggaaggaacttgttagataaaatttcttgttaactattaggggaagtccattacaagtagtctgtcactcttctctgtgttccaagttctctagaccctaggatcatattgacgtcacttggtcagaaacagtcaggctaacccaatatggtaatgagcttgcccttgccctaagtgaccggcttgataatggtatcacaaggcctttgggggttttagcactgagttgcgcgagatttatatattaattcactcaaatctatgtccggatttgcataatatatgccacagtcagaaatgttctatcatatgagcagactggattatggctgaagcagtagtgaccaagactgcacacaatattgaacccgccatgagaactgtcttcggccactaataactaatatactaccggtcgaacttcacacaatgtagctccaggtcatattttgacgactggcggtccacgagccggtcagaaatcgccaaatgatgtatggcgaggtgacgctgctagtttataacgttctagtaataggcagaggcgccgtagaggggcgtcaagtactcgaggcggacgaactggctcgggattgaagcgtgcccagactcgtcaggatattaggacaagatccatcggtcttgtgtccatccaccaataccatcgaggtgtcagggtggcctagcgcaaatataatctagggtaactcatatcgaacctgaatggaaaatccgaaattccattagccaattagcaatgattacgaggtagaagggtctttggatattacatccaacgtaggttctagtaagtgatggtagagaaaaaggaaaaaaggaaagagaccctagaatctgatttagtgctgtcttcttgatgtgtaccacaggtcgagcatttacacatgggaggaatttcacgacaactgggaacacgtcaatgtgagggcccactcagagaagtacgatctaccaatgatggctagtcgtaggcctcactcaaggcgagtgctgatgagatgcacatgcctctttggtgcaggacgggtgggggaaagtctcactagttgcatacaactgacatcccggctgacggttgccattggatgattgggccggctgcaggtgaggataagtcgatcggtcgaccaatccccgtacgctcaaggaaatgtagacagtgggctttttactgtccagcaccagaggtataattaccatcaacgatttgtcgccagttaaaggcaggcgtgtgtagggtgcgggaacctccgttcactatcagatcacgggatcagaaaaacccgacgctgtgggagcctatatgcgggtcctagaattcaattctaacgttgaggcacgggcttcctagttgatagcactcaaaattgtctgcggtggctctgactagataaaaacacgatctagtatttcactgggcaacttcgcctgttgggcagaaacgacaaccatgctttgcccacacccacggcctgatccttgcgaggagatttcggtggtaagacggagcgagagggaaaagagcaggggggcaatagaaggtgattcgagggcttcttggggctggatgcaatgagcttgccgcagcaaagtattgatccaccgggtgtgacggccattttgaggctgtgagccatcatctaggatgccagttgccaactcaacatcttgtcatggatcatcttcctaggtccgattctgggcgtaattgagcggcatttgccgacgatcacttgtcgtactggtgtattgtccagaacaatcggccaaaacagcaagcacagaattctgcaggattttccatttcatattggcaatctgtcatatttcgtcattgcaaataacgtgaatggcatctgggtcctcggtggagcttgcagagaatcctaaacggcgatccacggccttcgacccagccttcgctactaggaattggtgcagaaagccagaaacaacgtgccacgtcagagtctctgggctttggtgcagctgcatatggttcagtaatatgtggaatgtatcacggttcgtctgcggcgagcgccgtacatcaatccgatcctatcatttccgccataagagcaagtgggtgatgatgaacacacatatgagcgggggcaaatgcatgatccctctttgcaggagtgagagatcagctgaacgaaaatagatctatctggcctgcatccctgatttcggaggtgtggcacaagaactttcaattgcgtgttccgtgtccttaaacccgagtgccaatgatagagcctcagagactctagcactgccaattaagtgagtgctattggctgacagacacggaccggaaaggcgcagcaggggtcgaaagacggccgagtctgaattttgatagactggcgattaaggctcggcaggaataacacaaggtgacaggggttaatggttgcaaccacatgctgagacccaacatggattaccatcattgcccaaatgcaggaaacgtaagagccacgaggaggaatgaaggcaataattcgggatgtgcatgcatctgcaatcacacagacagcaatatcggatagatacttctgtggataaacatggcgttcggtcagaatcccgtgtcggtgctcatgatagatgaggtaatgagccaatcaataatggcagctatcaaaaaatcgcttcaggatagaacaacccattggggtggagtcacaagtggcgtgcagagtcccgtcatattcgcgaaggcagtagcttttctgttgcatagagacagggttatccctgggcatgaaagcctgattattgcatcaatacgacatctggcaaatgccgggaccgactcggccatgcaggagtagccatgcaaaacgcaagagaatcacaagcgtcgagtccatgcgaacagcatccacatgaaagcggggagaggcagatggcgacagcataattgcagtagtcgaatctggaaactagagtattgcagccatgaattgagggattttcggcccatcgtacatcatcgccatgaggcgggaatcgccacggctgatggttgcatgcatccatgaagcaaccgattgttcacggtggctccattcgagatgcaatggccatcataccgtctccactgcttggagaactgctcacagccaaccggatcaaccgtcaggcaggtgcgatgtgaaatccacggactggaaccacggatgataagccatcgggcactgagaaacgtcgatcaacagtgggacgaggcaaacatgggagaatagagtcgtggcatacaaacttcgaaacataaataagcctgtcaacgcccctatgatgctgtgaagttcacaatcatccctccggtttcacaattcgagtctgaaatcttcaagccagtccaatagatcttcctcataaaaagaattcattcgaaatttgtttcaactttgttgagcttctcgggtcctttcaaaacacagacaaaggtcggcctatcaaatccgacaagctcgggtgctgtcaggtgcaaccaatagcagcccgcattcaagctgaaacaaagacggagagccgtgagcaagtgagttatgttgtacttgcagtttgagcagcactgacagatctaataggcatgtgcttttacaaccaaaagagatttgcgtgtggagactggagctggaccagctttgcccaccgatgcaactatgaatatcgcaccggcgagacatgcggtatgagactcgtcaacatcactgagaatgagaagaccaattgtcgtctctgcgaaaaaatcgagaccaaaaatcgccggcgtagtgccgaagtcgaccgtttggaccggtggaagcgagagggtgccacacttgtggcttccattgatcggtctcacaaactcattatggacttggataaagagatccgcgccctgcagcgggagcgggacgaacgaaggagcactctcctaagatagggttggcttggatttgtaaaaccggtattcctttggttaatttttcttttttcctctttcccttttggacaggtgaataacaatgtcttgacttttgtgtcgggtccttcgtgggccaattgtcctatcgttttcttgttgcctgtcactgtttctttagggggatgcagcgaatttcatgtttcaccatttgtccgcgacattaagtccaaatcgagtttctgcaaggtgatgggaaagccgtatcgcctttgaaaagattgaggagaaatttaattggttcaaactccgtattggtttttgttgataggctgttaagctcccaaaaaagaatgtcaatagggactagcccagtcataagcgccctttctcctgggtgagcggttcgctgagacagatcgagtctcacaggacaaggagtggaacctgctgcagctagacaaaaaagacatcgaggcctgacaaatatcaaatggccattcataatcgaccagtccttgaaggaagagcaatggtacctggtgtcagagcgagtgcacatagtgggacaaaatgcccctcacaacacatgcccgcacgtgatgaccacctgcttagataacctaatagaatgaacctgtcaagaagatatcttagtggcaccatagaaaagaggcgaatgaaagtggaagtggttctgctggttaggagtgttgtgagaagaatccagggctagctgggctaaataggttccacttcccttgctctatgccgtggataactccgacattgcgaaatcaatccagctctaaaacgatagctttgggcgatctaagtaaaataatgacaagtttagtaggtataactgaaattgaaatcgataaaagtaaaaagtgaatgcggtagtgaactgaaggctacaaaccagcaagttggggaactatatatcacggcactataatcggagaatttacttctacatgccactaagcaacacccgtgcttcttcagcctacgtgtacctatctgcttcaatatcttcaaagcacaaagcgtcaaattggaatgcagaactgaaggagagcgctgagactaggccgatgtgcatgccacgtcacaagagaacagcaccaaatgcagccataaacaaaagcccacacgacagataaaagatcaatgttttgtttggacatgaggtgatgctatgatattgcaaccgaatgattatggtcaaactattggattcgagtacctgaaacggaaaaagaacaagagaagatttaatctattttatgtcaccagcctcgggctcatcatcgaccttggccagcccttgttcccggagaagggaatcaatctcatctgcagtccataggtggtggtagatcttgccatccttggtcttgcccactgttgcaaactcgactgcgtaaggtagaaatgttaggacgaaaacacaatacagaaatgaccgtagaactcactcttctcgctgctcagctttgtggagtccatagtcttgctcagcaccttgacagccatagcacacgcctccttcagattgcagtcctccttgtaatcttgcttgaggagactctgcgcacttgcgttgtttgcgccaacgctcgtcgctttccagcctccgtaatttccactggggttactctggtacaactggaattgacggagatggtcatacccagcgtagatgaaggagacaccaaacggacggagacctccgtgttgggtatatccttgcttcagatcacacaatcgacggacaagttgttcgcatggaatgtcttcgttgtacgtgaggaggtagcgttgggcgttctggcgagcatagttgatcagaatgttggcatcggcgttcatacccgcaacagcgcagatcatgttactggaaatcatcagctacttatctcaatactaaacacagcaaatctggctattttatttgagacaaaggtagtgttggcgtactcgttgattgtgtagagcttctcagcggaggtatcctgctccagcagcttgctggtcaccttcctctcagcagcgaggacaataccatccttggctaagacaccaagggctgtgccagcgtgagaaatagcctcaagcgcatattcaacctggtagagtcgaccctctggggagaagatggtggtctttccaaaatcgtcataggttagctggagctgcacaagaggaatgacggtgtgcacaaaccctcgaatcgtatctccgagacatcgtgtatgaataaaagaaagcgaaaaaaactcaaaatgggctaaaggtgagggttgattgtgcgagacaggtggttcgggatggtgaaggtcgatggtgaagacgtagaagctccaggcaactcgccctggcgcgtcctctgtcatccgccaagctcggaccacttcaccacaccaaagcttcgttgcgacgatttcaccaccttgacccgcaagtacggattacaagaccgatttgcccattactttgcattttaaattgattcatatcgattgctatgctcagatcaacatacaccgctccacctcctttgccatcggggtggacacaacatcgagcccccacaggttggtcttgcgctgggttcgagtgaaaggtcttggttctgactattaagccaggtcatttgtactattacaattcttccacaaaacaatcgacatatacccggcctcaagaaacagctcctcagaccattcaggctgctccagacaccccagaagcaacatacaatccagagacgctacctccgttttcttcaacaccatatggaccaatagggtttgcctcggggccggcgcaatttagtccaccccagaactcccgcggccgcggaggattccgcggtggnnnnnnnnnnnnnnnnnnnnnnnnnnnnnnnnnnnnnnnnnnnnnnnnnnnnnnnnnnnnnnnnnnnnnnnnnnnnnnnnnnnnnnnnnnnnnnnnnnnnnnnnnnnnnnnnnnnnnnnnnnnnnnnnnnnnnnnnnnnnnnnnnnnnnnnnnnnnnnnnnnnnnnnnnnnnnnnnnnnnnnnnnnagccccccccggagcccccgcggccggggaggattccgcggtgggagaggttatcatgatcatggacggagagaaaccgaagatcgaccaagagcgaagcatcctattcccgactgcgccccgtggctactagtaaagaccaagcttgggaggagatttgtgcacaatccggaaacaaacgaaagtttttggaaatttccagagcaagttttgaagggtgtggttgaatttgatcgcctcgagcgtgagaaaaaggaaaggaaagaacggggtgagcccgaggtaccagccaaaaaggaaccgccttcaccacagcatggtcgtatagagcctgagccgataccgcaagaggcggaacgtgcagattatgactccgactatgaagaggtcgaggttacagacagcgagggagaagagggccaaccgtcgaagcgtgcacgagctgaaagtgagggtgtcaaggatcagccgctagagttcaacgaagaagacatggcatatcaactagcagccatgggtgaagattacggactagaccccggggaatatggcgaggtcggagaagaagattgggaagagggtgcagagggcctgccgctgaccgaagccgatgccgaggccctcttccgcgacttgctggatgacttccgaatcaatccattcacgacatgggagaatgtcatcgaagaaggccgcatcattgaagatacccggtataccgcaccctcgaacatgaagacacgacgagagatattttccaattggacccgggacagaatccaagatgtgagagagcagaaagcgaagcaggaaaagaccgacccgcgcattagatatctcgcatttttgcaagaacacgccactccaaagctttactggccagagttcaagcgcaagtacaggaaagagcctgaaatgaaggactctcagcttggagacaaagagcgcgagaagttctaccgggaccacatctcgcgtctcaagcagcccgaaagcactcgcaagtcagacttatcagccctgctcaaatctgttcccttggacttgttgcatcggtcatcgaacttggaagccctgccaaccattatcatcaccgatattcgttatatcggactcgcgcccgaggttcgaaatccgttgattgaggcatacatatctactctgcctccagcgccggaggtacagatgacggcagaagagttagaagaagtcgaccgaaaacgaattgaacgggagaaacgcgagagggctcttgcagatcgggagaagcgggtggaggaagagaaacggaggcagcgaggagatcttctccgtagcaagcatcttctccgagaaggcgaagccgagattgaacaggcaatgcatgtcaacaaggacggactaatgagctacatggacattgatcaggcagtagacgaggaacagaagccgagtcaataatagttggtcactgaatattacatatcacttttgtcgagataaggacagtcgtgttcatattgtacatcaagaggcaatttgattataccaatgccatccggttcctgagggtatcactgtagatgagggaaatcatttcccttcacgtaaacgattcatcattccaccatcgatccgatcatttaaatctccaatcatcccaatcctcgtcgtcatcgtcttcactctcgctctcaacctgctccactgcgccagatcctatcggctcatcttgtgtcttgtcttcggcgcgggatttccgcagctcctcgcgtttgtgtttgagccttcgcacccgctcttccagctgatccatctcatcaaactcttcctctaaaagccgtgcggcatcctctcgctccccttccatctctgcctcacgagtgcgggctgtcgacgtcttcgatctctcttgttgtgcagcgagttctgcagccgtcactggcgctgcggatattgtggcctcagctgtaagagcggctggtacatggggctcatcggactgggcggcgacctcgcgttcaaatgctgcccatgcctcttcgtcaataggcgtggatggatcttcgcgggggcgcgtagttggttcttctgcaaggtctgcagctgactcaacaacctcttgttcgttgtcgagtggaggttctgggccagcgacatcatcctcaacttgctccgaaccttcatcctctgtagtgtgctcaatgcttgctgcgccagaggcagactggaatgtatcttgttccgcagcgcgaagcttctttcgcattactccatctccactatcaaccttgcgctttttggtgacccggtttcctgtcgtatttggctgagatgtgcccttgcgggaagctaattcactgcggagtagggatcggacgtcggccatattcttcaatttgtaaggataagagatatgttatggtaggtgaaataagttcagaaacaaactggcggaaacagaagagcctgtgatgaagagtggggaatctggagaagctcaatcttaagattcaccgaagggcatttcgccgcgaacctgtggctggtgacaaatagcacgtgatgacgcatccagtgaatgacaaagacgggagccaagccacttattcatctctcttcttctcctcacatcgcatcggatctcttttctatctaacatctttcaaccatcctttggcgttattgctttcgccacttgatcttcgagcatttctgctccaatctcaactcaaaccgtctagccctatttttgactgcaaagtgcgtgatttgggctcaaatcactccacgcgaccccgcttagcgccaagtgtcgatttgacgcgcagcaagggattgcacagtccaccataacacctgcttgagcgcgttctttgtcaccgcgcgtcaatccaagaaatattgcgcagagactagatcggttcttttattcgatcgagcaaaagtgtgggctagacagtgacgctgttgtgctgtcttcttgtgtattacattagcgccttgagctcgtagagacttttgtcagcctggggtaacacctgaatttcgagcaagtgaagagacctatttcctgccacgcgctgtagtacgcgcgtcaaatcaccattatcatggccggtaagctttcgtacaccaccactacacacattgctatccgatcacttttgagtggcagggcaaccccaggtctgggttgcgactatttaccagaagacaagctaacagtgagattagatgaaccccgacgctccggccgagccaccaaaggccaacacaagaaccttgaactgccagatgatcacgcaaaaaaaggcaaaagcaaaagcccgaaagaaaagagcgccaagttgtccgccgaacccacacccggtcctagcgaagctgggggagacgaagaagagattatccgatgtatctgtggtgaatatgaagaggaagaggatgtggagcgtgatatgatttgctgtgatcaatgctcagcatggcaacacaatgactgcatgggtctcacattcgtgaaaggtcaagaaccagatcaatactactgcgaacaatgtcgaccagagaatcacacaaccctcttggccaagatcaacgcgggcgagaaaccctgggaagagcttgccgagaaacgtcgccaagaggccgaggagaagaagtccaaacggaaaaagggcaagaaaggaggccgcaaaggaagacccagtgagagccggacggatgccagcacaccagctcgcactgcgccatccactacaccaggccctagcggttctcctgcacccgctgtgtccgccgtgcctgcctcagccgaaccggagaaaaatggccatgctgttgattctcggcgatccagcactaacaagcgcaaacttgatgaggcaatggaggcagaaaacgtaaatacccccatcccacccaatcatcacattcaaaatgttaacttgcttatttatcagggaccacaggtgaaacagcaacgggtatccccacagtctacaccggcagctatcccagaggcaacggcaacccgaatcaagacagacactatccccgaggcgcgtgccattggagccctggaggagttgatgcctgcccgcaagagtgtggccgcacacctcatcaagttgtttgtagaccagattactgcggcactgaaagctggttcttttaccttgcatgcgaaccagtcagtggaggacatggcacagcaactggctctatccattgaggatgccacgtatgagagtatctgcggacggtcaggcgagccgaatgaatcatataaggcgcaattacggtcgatcatattcaatgtaaagaagaatacttctctgcgagatcgtctgctcataggtagtctgtcccctaagttgctgtctcagatgacatcggcggagatggctagcgaagaactgcagcagaaggacgctgagatcaagcgagaagcggacagacatcacaccattattcaggaacaaggccctcggattcgacgcactcataaaggagaagagttgatcgaggatgaacaccatggcgcgaacgagtctattttctcccgcggaccccgtcgcgctgtgggggatgacggcagtccaacccacaaaagccctaccagccccatggggccacatcgatcaaagacagagatagatggatacgttcgtggtctatcacccgagggtgctcaccatgaccacgtcttccctgaagtggctcccgccatctacgagccagtgcctagtggcagggtccaagcagatgctgagatcgatcagctcttgcgcgacgatgaaccctattcacctccttattcgcctaaagacttcgacgacgacggcaccatctggcgcggtaaagtaacgatgcctccaatcggggagttctcctcgtccgcgaagcatgtgggaggcgcggacttgagtggccgaatcccatggagtcaactggcgcccgccaccttggttgttgatggtcgtatcgatatcagacgagcaactgactatctatgtggccttcagttcagcaagtctaccgatgtgtctgtgatagcaattagcagtcctgatcagcccacggatcgagcaggcttcgacaaaatgtttgactacttccatagtcgtggccgttatggcgtcattggaaagcatccgctgtccgctgttaaagacacctacattgtcccaatggagatcggcaccacaacgatgcccgagttcattgagctgctggaaaacatctcactggaagtccccattactcaacgcatacttcttaccattttcgttgtcaagaccggcgaatccaacccttcatctgtccagccgccatcccaccaggctagccaagagccacctgtctctgggagcccctcagtcgcggcgactcctcagcagcctcagttcagcgctggaactgcaccaactcctccctcccacttcggtggcttcaactcgaatcccgcaacgtacgtccagcaggcccctgcacagcaaggccagctcacccctcaacaccagcctgctctaaccggcctccccgccgcggtgcaagtcctcggctcacaagttgatgcccccgccatccaacaacttctcaagactgcgcctaacgtggacatggcgcagcttagtgtcgttcgcgacattctggctcgccaacctgctgccgctgctcattacgatactttgatgcaggctctatttgagacccaagcaaacggccatgtgcctcagcagggtgtgtaatagagctattcatttccatgatagccatttttttcctgtacagtttatcccattttgtatttccttttacaaggctgcgcaatgctagtcaggtgttcaggtgaaatctccagggctgggaaacgggtttgttttaggaaagtggaatacccaccgccaaatgttttcgaattttatgctggttctttactcgcaaaaatggaaccgattctagttagtatcttatacggcttgtttagccctgggtttattgtaggcagattgtaatcatgcactggtaaagttctgcatttgtagtcactaggttccattctatcactagtgatatgtattatttctctattatgacacagattgagatattccatcctatcaggtggaaagataatatattatacacgatttcttgtacatctttcagtgttgtgagatatcgacaagaagcagaagaatgaaaaatgaaatggatattgagcacttatcctatgacctccctaaccgtcgtttgagcatcatacacgagataataagtaaaaacgcctgcgctatgcaacgggtccccaagctttcaagaacgacgtgaagtcaacgaaaatcaccatccttcaccatctttcaccatcttccacctccgcggcgccgatatccaccgccgccgccaccaccaccaccgccatatcgaggaccccgaccagcaccgggacgaccgccagaggtgtaagggttatcatcttcttcatgatgacgaattggtggagcccggcctttcagctcgatgctcagcttcttgcagttcttgcgcatgtctgagtaccccatgtgcatttttccgaaaaagtgatccgccagccggcggtcgttgtcaagacgagacaagtaagctccgcaaacgtcacatacttgtagcttctggtggccggatggcccagaggtatcttgaaggttcttgagatcgcgctccagactctccttctggtgcttggaggtgcggactttgtgcatttcactgagtgctagtgcgacagagcctgtttcgccgagaatcgagacttcttggagaccggagttgatggtgttggaaaggtcggcaatttgtttaagctatataagaagttagtgaactccaacggagtccatctgattggagattgaagattgaagtaaatttatacataccaggtcgttcgtctgccgaatctcatccggcgtcttttccagtcggcgctgcgcagtgtcgattcggcggtcacagtcgtcaatgtacttctgcatgtcgcgcaagtaatcgaattcgaacccccatttcgccttctctgacgcagacgcagtgtcatattctgtcttcaagccttcactatggaccttggggcaaattccgagatcttgcttggtgtttgtgaacaggtcgtgcgggcaggtgccaacaatgtaagaacggcaaactttgctgtctgtgattgcgagctgggaattgcgaccctgtgtgccagttccagtgagctgatcagctatagacagaagcaatgttagctcaacttaaagagacttgttgggggtggccagagctcggaaattttgagagtcacaaaaggagcaacatacctcccatgagctgctcaagcagctttctctgttctgctgccatgctgacggtgtctgcactaagctggaaaggaaatgaaagacgaaattgtgtcaacgggctgattggcggcaaacgacgaagtcttttgctttggatgcttttggcgccaaggaaggcggtgaggctccgctgtcaacagcatctcggggattttggagtttggcttcgatctttctttcgatgtggagcttttatattgacttggcgattactgaggtctgattttctggggccatagtcaattaggctcatcgcttcaccgagaccccctgccaattgaccagtgacaaccgcatggacgaagaccgagctccggcaagcatgaagtcatgacggtcctttcactattctcacttccttttgtcgcgcttattctctcattatggagctcctctgcctttgcgtcatcggactatcatgagcacctcctccttcaacctctcccgcagtcctccttgctagcttcttttaacttccgaagtaatacgtcgcaacaatcattcgaccaacagcattttagatatttgcctcgcgcgcttggtcagattctccaacacgcccacacaaaagaattacacctccgcttcaccaccggcagatgggacgctgaaagctggggcacacgaccatggaacggcagtaaagaaggaggcactggcgtcgagctttgggcgtggattgatgcgccggatgatgaagagtatgctcctcactcgaaatatgttataaaagacacacaatgctgattgactagggcttttgccaaatggatcactctgacacagtccctctctggtctattctgcgcctcactgaacttcgtggactcgacccggaccactcgacctgttgtttcttttgaaccggctggggatcactcagctgctgatcagctgcaccttttgcatggaacgcttcctggagaggtagtttgcacagagaatttgactcctttcttgaagctgcttccttgcaaaggcaaggctggaatctcttcactatttgatgggcacaaactgttcgatgccgcgtggcagagtatgtccgtcgatatccagccagtctgttctgcagatggagaatgtgtggttcagatcgagcaaaccgtggacatggtcttggatattgatcgctccaagcgctctcgttgtgcgtacttttcaccggcatactctgcctcaagattgctaacatggatctagcgaacccaattcctcggcctgtgcctaatgagcagctggtttgcgacacttccaagccctataattcggatgatacctgctatccggtggagaagacaagcgagaaggcatggagtcttgcggaaatttttgggcgaagcctaaatggtgtttgtcctctcacagatttcgatgggtctagcgaccagagtgtctgccttcgagtgccccacgaacggggtgtcttcatatccgaggaggccaatgaaatcaagaaagatgatggctttacacgctgtttcaaattggcgccctcggttccctttgatctttcgatcccgcagcagccagccaacactgaagttccattggacgagcctgttttgcatgcggagcgaactatcgttggccacggccaggagcgcggtggaatgcgcattatctttggcaatccatccaacaccagcgcagttgactttatctacttcgaatctcttccgtggttcctgcgaccatatatacacactttgcatgcaacaatcacaggacacgatggagtcttgcgtgaggtcccagcctctgaaatcgtcaaagaaacgtactaccggcctgctattgatcgcgagcgcggaacacaattagaactggcgctgtcagtccccgcagcatcaactgtcacgctgacttacgatttcgagaaggccattcttcggtacaccgagtacccgcctgatgctaatcgagggttcaacgttgcacctgcggtaattcggatcttggatacggcccataatgtgccgatctacattcgttcaacaagtctgctgcttcaacttccaaccccggatttcagcatgccgtacaatgtgatcattcttactagtactgttattgcacttgcttttggaactatcttcaacatcctggttcgacgagttgtctctctagatgaggctgccgctctcggagcccagaccctcaaaggccggatactggggaaattggtggccattcgtgatcgactccgcggcaaggataccaaaatggattagttcttatttgaataagtaatcacaattacaataattagcgggtttaaggccccttaaaagacctgtaaaacgcctagcattagttatatattgcttttcttcacagaacctgaagacctgtggtattgaggccggaaattcccgctgtcactaactttacaatcgatgcacctaggaggttgttcatacaaaactgcctctgacctcattattcgaaatctgatagtacatattaacgcaacacatggccacttggtcacttggttggaccggctcgaccaatgcttgagccagacgcgaatgcttgttggacatgctcttccaaatgcaacacactatcaactcctttccaaaatatggagtcaatccgcagaaggccaagatggaggcaaggcaaaacatcagccttcaggcgcatatcccggcgcactttgttcagacaagtgacccatttgtctgcctcgttcctatcaatggaggtggcagccatattcagaatttggaaacagatggacgagaatgcagtcgcactccaggccggccataaaacctcgaagtcttccggacgcagctcgtgaatgaactccgctgctgccaaaatgcaggtttctgcccggatccgagcctgctcacgcgccattatatattcggcctcattcaaattttcaacggttggctgcagaaacggcctcaaaatagccctggaaatactcagatgaatataatggtagttcatctcgagtgttctttctagtccgattggtctgccttgatttaatgatctgacatcggtcgatggtacagatactggtctatgccaagagaagagactttcaagcagtggaccggttaatgcgacggtcttgtggttatcagtacacatggtattaatggcacgaggagaactaatattagtgagttgcggaaaacggcgagacagtggacaacggacacggggattgtcttactataattgcgctagaacacgatcaagtattgcgtcgagttccgctcgcttcatgatattcatccaggctagagggtcaagtccactgtcaggttgatcctcttgactaagacttgtcacgagccagttatcataatgcagtaaaggtggccgaccaaggctcaacgcaagccatttgtctgtcgaataaatgaaatacgacaaacgacgtcgctgcgcaatttgccatggaggtattcgccatgactttggatctaaatgtagtccaagggtatgagcgcaagcaacaagggtggcgagctgggaccatctgaagccactatccaatacaattgggtttggataaggtcgaatggccaaaagaagcattgtctgcacaacacaaagcttcggtgcgtggatctcatatggaagcgctttgttgataatctcgcatagtgccacacctgatggcttatcatacgcgagatcaatgcatagtctttcgtcaaatttagtgaagggctcgactattaggtatacactcgcaaggaggtatggcgggctggtgttggggtttaattggcctggtaaaccaagtatcgggtaatccggtgcgatgattctctcaaataagttaataagtctgagaccgatatctgctgggaccaaagactcgagttcctgcctcaattcaagggtcgaaacgttctcgcatccgttttcttctctgctggcagcaaatattgagggctttgacagtaaaaattgagttggctcgggtcctgaagacacagagtgaatactgagatttttgaaatgagaagccccagatgtgtcgtatcgataacgaccaatcagaaaagggtccatatcaccactactgccgagcaattgtggtgtgattataccctgcgtatcaaggcaaatagatgagccattctcctgcataagcaatggaaggcagtttgcattcgatgaagctccaacttccgaatggccagtccctggaagcccaggtgatggataaataaagctccctggactaaatccagtcggccatgtgccatctccaaagtcacccgataacgatactccagctccattaaagaaatcatgaaacccttcaggtgcagcagcaaccgaatgatttaccccatgatcatcaatcggcatcaagatatcgtagtggactgagtcaccaactggtgaaactgcacgcagatctgagtgtgggcttatctcagtttgctgggtcatctgtgagctaatcgcttcggagaaaggctggcgtggccttgaggtcggttgtagaaacgtgcattctttcccatgaagtgtacaaagataacagggaggtgctcgatcaatgcgacaagctgccttcctagagcgacaggaatcacaagcgcggttccgcttactcatgtacctacgagctctgcctgacatcctttcattgagaaagttgtcatgagcacatagtagattagtggctaaacgagggtttaagagatacgatgtccacacagtcaaatcttagccccacattccacgtgactatatctgggttccaaggttcttgtattaatgtgatttattatcactaaaggtctattcgagtttccatataaatatgattatgctgaataaaaatcttgcactaatactttcaaatctccacactttgcttgtgctctttttaactatcggtacaactattctcggagtcagcttcccgggtctagtcccctgcgaaatattgagttgggtggacaaccttcagccgatgtctgttagacccatcattgggttttcttccactttctaagctcaggcttttgttcttgccccgtaagcgcatgcttcacagtgccaactccccaaggcaggatctcggccgagaaaccgcaggaataaaccctatgcctccgacaaccaagattatgaccacccagtcccttagtacgactacaggaatggattcatgatacgtaggcagaaatatagtagggctgagcaagtttgaagtttcagttttcgtgtggtatgtatgagtcagtcgctgggcacaattcggcgtcctattcttgatgcttgacttgtggtccaagctaacagctgagcaatttaagttgtattattgctaatttgagctctcattataactaaatcaatacccagctcatgcctaattaaatagttaggctgcggttgtgattactagtagttacgtaactaacacgaaatgaaattttaagttatcgtgccgataaccttgtccccgcattgcccgggccgacctcgggaagtaaaagttaaggttgtgataacattcttttattgatatcagtttgcatggagcttagaatttaggggaggaaagaatcgggactttctagaaaaagtcggtatatcctataggcaaaatcatgcaaaaaaaaaaaaaaagagaaaaagaaagatttattagaccaatatatcagggcatcatgctcagtttaagggaacttagagcttgagcaaaataattttttatgtctagttttggcacatactccccagtactattcactcttgccgtagtgcacttgccgaagcatctgactagtgtcttcgatatacacaaagctttgtgagagccccctttcggggtgattgaagtgcccgaatgcatgtggcacgccggggtatctcttcattgtgacatcatttccagcctcttgcataagctgaccatagtactctccttcatcacgctcaagatcaaattctgctgtgatgatgtgtgcttttgcaaggcctttgaatgaaggagcaaggacaggcgtgcatatccactcttttgtcaagattttttcttgggtagctagaaacgaatgagtaaatgtaggaagagggttacaagcgtggaatagagaaagaagacttaccgtcatcgtcgccaagccaatacttcaggaaccattgctctctgcctaatggtccccaaggagaatcatggaatagcaagacacttttgtagggacaagtagactcattcagctcgcgtgttcttagacagtagcgcatatctgtcgccggaactatcattaactgaagttttagctcaatgccctcgtcacgggcgaaatgcgccatcactgcagtcatttgacctccagccgagagacctccgatagaaacactcgagggatcaacattgagcttagaggcattggttattgtctgtccatatatcgtgttagcaaagcaaacatcaaatgatattgtttttgtatttacccatttcacagcatcccatgagtcgtagatgctggtaggatatggaaattccggagccagtcggtagtctacatcaatcactttaatttgcgctttgttgcacatgtgccggcaccaagcagcttcagacttgagattgccaaggacccatccccctggagccaatgaacaacggttagcaaatccacgttagagagcgtaagggtggtatcgtaaattgcgtacctccatggaagttcaaatgaacggggaatggaccaggtccttttggcgtatataccctgatcatgatctttccagctggttgagagactgggatctctatgtcctcaacacggaaaacggacggaccttgatcatagtaagtgcttgtttagacgatttaatcaagactctgtcttaccagggcatgttgggtaggtgaagctatacgtggcgggacttttgcgatattcctcaagagatagctcgtcggctctcaccatggagctgccgtgcttttcccatagttctacccattcaggatccaatccacccaagagcttgtctggtatagacaagcgccccttcgtcccttctaccacgaccgatgtctgggtacctaccacgactgaggtttgtgtactagccattgcgatagggaggttggcaataaagagaaattatgaaggccaaaagatggtaaatggtcaattttaagtgaacgactaaaatgaattaagagatatttgacggtgttgataaatttagtcacttacccttcgatatgccttggatataatgccgggctctggttggcggcatcggccgtattgtcagctccgatctaagcgataggcatcggggtgggggcattcctatctgcgggtccaatgtgggccgtacaccccggattcgttcccgatatcgatccttccactgaccgagttggttaaattgaaacgccgttcctctgatttggcatagggtagagaagagttaatattttgtctcttacacattgcttcacatactgttctaaatatttacattgttcagccgatatggactctgtctcagtcgataaccgaagagactattcagaggaactggacaaagttgaccagtcacctactagtctccatgctggactccgccgtgttcctgacaaattcccacgtgtcgcactattaatccttgtcgtcgaggtaagttgctccaccgcccacgtgttgattgccctagctcgcccgctaacatggacatactagcttggcgaacggttcacttattttggcctcagcggtcctatgcaaaattatatcaagtatgctgtcttttacaaatgagttgatcttttgaaaacaatatctaactccgtttttatctagtaacccctatgatcctggttcagatctccctggcgcactaggcaaaggacaagcaaccgcatcggctcttggaaacttctttaaattttgggcttatgcctccaccattattggcgcgattgttgcaggtaatacatctccccttgagagattgcatcattgttattaatagtccaccagaccaatacgtcggcaaattcaaagccatcacaatctctttgggaatctacatagtcgggttgatcatcttggttgcaaccgcgacaccagctggctttaagagcgatgctggttttggaggcttggttgctgcgatggtcatcattggcctaggaacaggtggaatcaaggccaatgtgactcccatgtgcgcggagcaataccaaaatgtagagccggtgttaaggatactcaaatcaggcgaacgtgtggttgttgatcccgaaatgaccgtgcagcgacttttcatgtggttctactgggttgtcaatgttggcgccctctcccccttgattacagtcaatgttgaggcgaagagctctttctggcttgcatatttgatcccactgatgtaagttgggataagacatatttgtattacacacctgctaatttcctccagtgcaattgttctctcggctatcgtcttcttgtccggccagaaacgatatgttaagattcctcctcaggggtctgctattattgatgcatgcaaggtcttgaacattgctcgacaggagaagaattttgaaaacgcgaagccatcagcactagaggcctcaggacatttgagcaagtatccatttgcatcttcaccgcactacacggatcagtacgtctcagacgtccgtcgaggctttagaagctgcagagtaagttgggatctgatacctcaatactgagttatgcttacacatagtatagatgtttatattcttcccattctattttgtttgctgggtccagatttggaacaatcttatctcgcaagctggacaaatggcgttgcatggaacgccgaacgatctcctgcaaaaccttgacccgatcgccttgtgtatcttcatcccacttcttgactgtgagtattgaatgatgataccgaaataacatccgctaaccaatatatctctagtgggcgtctatccagtctttcgcaagtttaagatcaacttcagcccagtccgtcgaatcttcgccggtttccttcttgtctcaatctccatggtctacgccagtgtgctacagcattacatttataagtccccagcaaacagcatacacgtgtggattcaagccccagcatatatcttggtcgcattctccgaggcctttgttattgttactggattggagcttgccttcacccatgctccgaaaacgtgagtcaactgcccacatagtactatcctactcaaactaaccacaacttatttcagccttcgatcttttatctctgcacttttctggctcatgatcggcattgcggcggcgatctgcatcggtctaagcccagtgtcgcaagatccgtatcttccttggatgtatggatctcttgcaattgtgggcttcgtggcgggatgtgcgttttatctttgcttcaggaagagtgactctcttgatccagtagacccaggattcgtcgaaggagttccagttgaaggaaacgggcagcatgttatacagattgctgactatggcaaacacagtgaagcatagaagttgtctgttcaattaaatagcctatataatcaatctacttccgactattattctaacagccgttttccttacatcacacgttcaagtagatgtttgattcctccagattttagcatctataagcctccgttcattccttcgtccactacttatgtcttcctttttatacactcatctcgacaagttgcaaataataccaacagactgaaatatatactatacgtacagcctagcatttggatcaacattgaacttttctttattcaagttcaatttaatcaattcgataatctagagattgccctaaatacaatcgtggcacttgtggcaagcccagaatttgcgagataggtatatactactcttggtatccaccttccccagtgccatgcctctatcatttcaattcagccgaacttagaatcacgggcgccaatcacaagctatgccgcctatccccacagtttaatgccgccaatcggagcagcccccaatctttcgcctccgagataggcgcttgtttactcgttaacctcatctaaattgaaatcgggattctagacacgagataaccaatatgaaatccaatgagtcaaagtgaagggctcatcagaaattaagaagttcttgttggtgttcagagttaccaggcacgatcgaggtggttgttctaatatcacaagaattatttatatattacatctttacactcttgagacggtttgccagagtgagctactaatagcatagaaatttagaggtgacagtatacttagtagatatatacattccttcatatccctgggagagataatccattggaccatcttatcccctgtgaaacagattgatttggccaggaattatcatgtaaatctgtcaagaaacaaggaaactcacttgccaaaaatgttcttaactgtactccatccaggataagtatcaggggcaccggccttatggttcatgaaactatggtcttcggtaacacaagttggctctccttcggcattcataggtagggcattggactcaagcatgttctcacgctcgataaacttattttgcgcttgcgtcttctgatcactcaaagaaaggaagtcacccattgttgatttgggattgatagcctgtggtatgagagttagggttagttagcatattctgtgaagctgtcccgacaacactcgaccacgtacatctgaatggcccaatccctcattcttgccacctaaccagagcctgtcgccccatccttgtccacctccgacattgttggcgggagtgggctcggcactgctgccaccggcgaccgcagtcgtttggcggttgggggtactatcgctgcccattttgatattgtgaatattctgacctgcatatgaggtcattagcgtaatagatcttagcgagaagcgattcaaacgaagtgataaaataatgagagaagtggatggtataagtcggcgttgtatctggaagtttgtaaactcacgatgtatatgttaaggaaattcggttcaattgtggcttcaatccttgtgattgaaattgtttagctggtggatttgagatgaagttgaatttgtttacttggatttatatacgttccatagccttgacctaatcctcgccacaaccccgcatgaagtcatgatgagtacatatcactctctgtgattggtttaccattgaagtaactacgtatatcgaatacttacatattgtcaaacttgctttcccaaatgctttagtttgccaggtattcttcgcccctttgtttcttagtaccttagaagctgtatatatagatgacttatggcagtattagtgcccgaacctcgatattctcatcaattactttctagttcctttccatgtgtatatggtacatgcatggcatataaataagtgggttctagcatgtattcactgacatttaacgaagaagttataaacattgttggcgcttgaggaaaccagccgtggaagaagctctcccgatgtccacgttataggtttcggaactatatatgaacaacctgcttcatgtttgtcttctctttctctttcctattctcatgattcttactgatgacattatcctttagggagatttgatataatcatctcactacgcatgttcaaacgattaaactattgaactattgaactattgacgatgcgatacctcggttgacaggagatagcctactcgtgttgctttttgtcaaagtatacttggaaggagaacgggccaatcttcatggcgagagccaatacccgcctcatggaaagaagattgtctccaatctgctattccaatccgagaacacctatatcctatcttgtcttgatatgaatacccgggacaatcttttttggaataccgccgcggtcggcaacagaagagtggaaatcgtggacattctactcagaaatcaagggagaaggatctcagggcgttccattcctagtacacacgagccaatcgtgcagttgcttctgtggaatagcgagacctaaatgaagcacacctggaagccgacacaggcctttgggggactaccggcgactaagtatcccactggggcataaccctctcattagtgagaggtgacaattctttttgggaattgtccccctcgaccctgcctgaaatgtcagtaccgccttcctaatcgggtacctcttagaattttgctacagatgtttaaccaaattaggaaggcggtactgaaaatggagtagaggggtaaagaattagccgcagaatatactactgatgtggctagcggatctattaatctattattttggacttgaatcattttatttaacttatatgaatttagaaagccaatgttgccctccagttttcagtgggttgctcattttttgcgaggatgctccagatcataccgaaccaccctgaaagttggccaaacctgcaacaagacagcgccaaccatcatacaacccgcaaagacctgagcatgcaggaactccgaggtatcgagattgaccaaagcacctgcaattggagttccagcaagcgccccgaaagacgatatcccccacatcatgcccaaacgagtccccaagaagcttgaatccggacagaaaatcggatgtgccacaatggaagtcggcgccgtgaccaaaacaccactgagagctccccagtagcatgcccagacaataaacccagccatactggtagccgcaatccaagtgaacatagcaatcgccgacgcgatcacggagaatatcagtatcccaataggttttatatatgcgacaagcagatatggaacgacgcgaccgatgacggacgtgccattgacaatagcaaccatataaaagctaaaatcggtagtggtatgcaccaccgtgcgggcataggaggcgatgtagaaaattggcacgtagtatgcgagcatgacacacgtgagcgagagcgagaacatcataaatgagggctcacggaaggcactccagtcgataagacttcttgcatgtgctctctggcctggttgccgacacaaaatcagacatgctacaacagcaagaaataggctgatgaagccaatgctgcgaactgcccatgcgaatccgactctgggctgcagttggcggaacatgactgggaaaatgacggcccccacgctagacccaattgatgcgcagccgatggcgattgggcgttttgtggtgaaactcgttgatattacgacgagggctgggatgtaggagataccgcctcccattccgacgcagaatccttgcgcgagtagtacctattcttgtcagaaatggttcttccaatgtcagatttcggatgtacctgatagtacgaagtggcgagactggtcatcatcattccgaatacagtcaagaaacttccggatataattagaggacgcaagtatccgatatcaactaatggccccgtagcaagaccaaccattgggattagcgtggcctggatactgcctacccatgagatcgtggatggtgtctcatttggcagaagttctgtttggtaatactcttggaaagagccataggtcgtcagtaggcccctggagacaatattagcttgatacaagcacagtaagtgtgacaacagtgtaaaccaaccaagagttcacaaagacacagaagcccgcaagaacatttaaccatgcatcaaggcccccattgactctttttttcggttgttcgttttcacgttcattgtcaagtgccaagttgtccgatggtaaatgtggttgggcgccatgtgtcttctttgttgaacgcatttcgatatatgtgtgccattatgtatcaaaggaaaacagctatgaccttacagttataaggaagaagaacccttttccctccagcactccactgtggggaaaccggggtttccattagtcaacttcttcgagcggcactgggtagccgagctctaccgatttggttggctgttatgggtttttttatgtgctcgtcggggacctccgaatttctgatcttcccgacatctacggagtatgttgtacttaaccgcactgaatattacttccgcttccggaatatatatcgcctttctctagggctccatgatctaactttgtgcctctattattctctcgcaggactttcttctcggacaatttcttggctgcatgctcctatagtgtcagttgacgcgagactagaccaatcacatccacatccggggtaaaagcctcctacacattggcaatcttcgttctatatgagcaatcgagatcaactatgattcaatcgaaccctttttgtcgtctttgaccttatgaattatgtcactaattttacatcgcatttgccgaatgattcaacgcacaatcacgtcgctcaatgcgctatgtgactttatgctaacccttaaggatttccgttgatgtactccgtgaccgttatatcaccccgatctggagagacattggctattcatggttgtgatccattgctcaatcacgtcagagcacgccgcccctatagccatctgctaacccccaaagagccacctcttgtcgcaagacggcggtctccctgtccctctccagattgtgcattgctggagatccccgtttgtttgaggaagtgttattctgctcggtcttactacagtcccgaggtgatccctatatcgggcctccttcacaccgaattgtgccttctgtacccgcctattaacaccaatatgtattatccgcctaagcctaatacactacacatcatagagcttgggaaatggctagcccgctgaagaatggatgtggcgagttggatcttactagaaaaggcaatcaatggtgcgtgaagtatgggcaggcctttctgatgatctggagggagaaattccaattatttagacttattccgcgttatttcgaccagtctcagagtcttgccctagcaagcactccattttattgaaatacctcaaggatagaggcaacataagcggccaatgatacttgttgtaaaattagaagaaagcaatgattcaacaatgtcatattccagaaagcagcgttcgctatgagcgtcgatataagtatatgtaatgctggacttttgcatctgacccatctgagccaccaatcaaggcttcaggacaggcgggatatcaaattgcaagtgatggaaaaaggagtcttttcatgtcgtgaatacagaaagaaaatcgtaatagccaatgagaaccaaaacaaaacaaagtcatcttctaatgaggttactcatcctcaaactggtctgcccatgttccagtgatgggtgaaaacgaagattccaatttttccattgctgactgtgacttggatggtgcaggagcagtttcgagctggactttagtctcagccttaagcttgttctccggcgcaggcgcagctttggtctcagtcttcttgggtccttcaggcagagccgggaatgcactctcatccaacctcggtgcagcagggctctctgttgcatatatactgtcagctaagcccttgcgtggccggtctccctgtagggcacgggaagatccacggtcacggccacctcgaccacctcgtccacctcgtccacgaccccggttgtcactagaatgatctgcaacatcttctgaacggccgtcttcaaagtctcgtcgcacggcgccagacacaccgccatgcataccgcgtcggaattggctgcctccaccgcgggggtcataatcttcctcgcgtttctgcgagtcccactcacgccctgtctgggccttgagtttacgctgtctgtttttctcacgttcactatccataacgcggcggtgcgcgagttcctcacgacgtttcttcgccgcctcctgctcgcgctccatgaacgacgcctgatcagcttcggcgcgagcatgggctgcagccttcttcacagcgttctccttggctgcagcaatgcgtttagatagttcctcctctgtgagtttaggctggaagtaaacagtcagcaaggtactcttggtaagagcgggaaggactgcatacttttctcagaccaccagtggcactccgatcaccacggacagctggcacacgctgggcctcttcaccaccctcttcgaccggaccggtctgctctttaggctcagcgggcttctcatgcctggaagcactagcctcacgcacatcggcagcaggcgcattggcaggagcctttttgcgcggtgtgctttctgaccgtttttgctctgactcccttccaccgcgtcctcctttgccccgactccgtcgtccccggcctcgttcaccgccacggccccgctgcggagtttccccacgtggaattggttgctcgggagcttgcttctcgggtacatgtgcctcctgtgactctggctctgcctcggcggtaatggcctctgtgtgcgcctgctgctcttctgtggagattgggataatctcgtcgtcgaataggtcgtcagcgccgcgagtttgtgcgaactcgtccatctcggggtctgccattgcgattgggtctggataagtgcactggaaggttggaaaagtcgcgggtgggctgtgaactcgaaactcgcggaattgttgccgctatatacgcgattcgaggggtagctgcgatggaggggctcagatgatggtctgtgtgcaggctagtggagggtgtaatatattgtcgtctttcaaaatttgcaataattcatataaaaagcatatgtaacggagaaacgaatagcagggattacagtggtcacacagctcaactgatctgcaatccagctggggcagtctgctaggcggtctgctattgctgcggagcacattgttttgccgatgaactccgtctgctttctgccgatataagtcgtgcctgcgcttgtttgtactcgacctgttttgacatgctgcaactaggccgatttacctgtcaagggtaagttggtcacttcccggccccaaactcgacaagtcgaattagacatttggaatgtccatctcctcaagtcagagggggaagaaatccggggttctccacaaatgcggagaaaccccctgcttcactccaaggctgttggaatcggcacttctgattgcttgtatttcgtgatgtacgtagttgctcattcaaggcgctatctcagctcctattccttgagatatccgcgtagagacttcatcatagtttgtagatttctcacattggcgtgagtgagagatccttggtcaacggtgacctggctcattcaagggtatagacactgttttgctttttcttcttgaaaatccacgggtatttactgcacaaagctgtctgtcttcggtggggggagctccataaacaaggccaaatttacagcggagttctatattgctactaggtacatgcacagttgctggggaatcccgttgagtaatcgagtctcaagggttattggaactatcttaagtccccatcattgtgacgcaaaggctgttggcaaaacatagaagaaactgggtacatgtaggttgtagcatgagcacagaatttaatctcggtcaactatcaaccaatcagacaggatagtcaatcgctagttaaggactatgatcatcagtatcaagcagggtacctggactactaggtatacacacacttactgccattgcttgagcgtcttctcaaggtctcccagcctatcaatctgctttatatgaatcacactgagagaatctcggtccttcgataaaacagtggacttctgtcgtatcccacgtatcttatctagcaacctttctgtctcgtcatgcgcagccttggcttgttctgaggttggcgtgtctcgtagaatcttgtacagccgattttgccacgccggtaattctgcctcttccgcacccatctgctcttcgagtccagatgattactttattctgatatgtctcgatatcctttctcagggcattggtggttcggacgatcatccatgcatggaacttggtaacgaagtgttgaatcaatccacgctgctgctaacgagataagagagattcctgccatcggaaacacaacaaataaaatgagcccgttcatgatgtagagtttggagcattgtaaatgagtcagtcaaaaagtgagaacatttggaagttggagagtggtaataactataaaactttgaatctaattggctacttcctcttatacttcttagacatctcgagccaagatctcaatatctggatcatcgctgaagtatcgtcaatgccataaagaagtataacagtggtattttgatgttaatctagtgggtatatgatttcctttatatcgaaagaaatatgcagccagtcaaccgctagggactagaggggtcatgttccttttgattagggttagaaaacttattactatcactttctttacttcttcaatagcagccgagtcttaaattagcggagcgctacactgtgtgaagcaaccaataagatacccgcgatagccgctatagaaggccccacatctccgcagtcccttcggatattgcgccgagtctccgatcacatcattggcaatctctctgttcgaaaaacttcagttcgctctggaaatcacatcatgtctgcgggtgacactgccagagagcctgcgtctgagcaaacaccgctccttcgtgattcacccaatagcgatgccaatgagaataccccactacaccaggaacccagtaccaaggagctgatttggatcctcggaagcatttggctcggtgtcttcctagctgctctcggtatggacttcaactttttcaggagtatcataatgactgactttggctcattgcagatacaacaatcgttgccacgctttccgcgcctatctcttcgtccttcaactcattctcgttgctctcgtggctagccacttcttatttgatctccaatgccgcctgccagcctctcagtggccgattgactgatatttactctcgtcggtgggggcttgtgttctctaacgtcttcttcgcccttggcaacttgatctgcggcctggcaagagcacaatgggttatcattttcggtcgcgtcgtagcaggtgtcggaggaggcggtcttactgcgatctcgaccttcgtcacttctgacctagtccctctccgtaagcgaggcatatggcagggcattggaaacatctgctacggtgctggtatgggacttggaggtgtgtttggcgggtggatcaacgatactctgggatggagatgggcgtttttgcttcaggttcccttcctgatcatctcatgcatcttagtggcggttaaagtcaagattcccgtgaaggagtcggataccgcgcgcatcaaacgcgttgacttcctcggcgctatcactctagttctgacattggtcacattattgcttggcctcaacacgggcggaaaccaagtaccgtggacccacccactggtactgacatcgctggttgcctccgctgtcttcctgggtctgttcatctatgtggaagctgtggttgcttctgagcctgtcattcccgtgcgccttttgctgaaccgcaccgtggcagctgcttgtctgaccaactggttcggtaccatggccatcttcggcctcctcttttatctaccggtgtacttccaggtgcagggactttccccgactgctgcgggtgcgcgattaattccgcaggcggtcggcacctcgatcggctctttggggtcgggtatcatcatgcgcgccagcggtcgatatgcatctcttaattatgttgccatggctgtccaggttctctccgctgggctcatctgcactttgaatctccacacgcctgtgggattgccgttcctctatttcttcctaggcggagcatcctatggtagcatgctaaccatcaccctggtggcgctcatctctgctgtagaccaccaacaccatgcggtggtgacatctgcttcgtatgccttccgtagcacgggaagtacgattggtatcacggtcgcttcggctgtcttccagaacaccctaaggctcgggctgtggtctcgattgggtgagcgcaaggacgccaaggagctgattgaacggcttcgtgacagcttggacgaaatttggaagctgcccgcagatttgacatccggggttcttgacgcatacatggactccttgcgcgcggtgttcgtgacattgttgggcctggccgtcctgggagcattgaccagtctggctatgagggagcacaaactgcacaacaacctagcccgacgatagagtaggtattcattcgggcatttaaagaaaaaatgttcgagtattatattagatcagctgccatcagcatatatagggttgcggtgtcggggttcgcaacaacccagcagtcaacgtacaggaatagatcaatagagagacacatgaaacaagtattggaagttgtactccgtcctgaagttgtatgtaaagcacatgttggatgatctcaggcattgaccgcttcggcccaacaactcgccaatcaatctcagcttctcctgtacggccccatttttaaccgccattgaccccgaagcagcattttggctctttgcgattggccgatcgtttccctcgaacgaatctcggcattttttcgccgtgcaataacacggttcactcggtagctcatcgcatcgggtgtgtggcaaagacgtggcgagaccatccagacaacgcaacgacctcaccgctcgaggacaccagttgatcgtcgttgcacagaataaagcgccagtctcgatttcaatcctgggttgcatgattggacttgatcagaccaccagtccgataccttatctctttgtacagtctgagagtccccaatcgatctcgttttatcgcctctcggcttcgattcttctctactatttgcgcctacctatacctttcctgcgaaaaagaagtctgtttcttccctccggcttacctccttatccctaaacacttcagtccgccttattggtcacattggcatggcagttggatttcgagtgaataattcaccaattacgaaaggcaagggcattacaaaggggtcgtggtcaagtgatatggaggtggatggacgctataagggaaccgtgattggaaacaaagcggtggaaaatgcgacatcatcccatcctcggcgccgccgattgcttttgtcgacggatagcgctttcgccgacatcgtcctcccgtccctcgttcagaacccatacatcgagctgcgactgatcacagacgaaccatcggctttgctcacgggcaccaacaagatcccgcactacatggatatggtcgacagtcaaacattcgataagaaaaccggcgcgcggaaatggctcaaggcgaagacggcggagctatgcgaatgggcggatatgctcttggttgcgcccatcgatgctggagctctgggcgcgatgctggctggcttgactaataccctgacgttggcgctccttcgtggctgggtcttgaagaaacccgtgatcctcatcccaggaatgacggtgtcagaatgggaccacccgctcagcagtcgccaactcgacgaaatcagtcgtttttggccttggattcgcactatcaagcctgtgctgtggaagtcaaacgggcccgaagacctgacaatactgccatgggacggcctaaaggagttacaacaaacactagagacaacactaaaactaccgccgtgggaagctacccttttgaccagagcaatcccgcatggtgcagcggtcccggctaaggctgcaaaatctatatctggaggtgctaccggctccacgccacaaacggaacattcggggaaggccgatttcttaccactggaaatctggctaaatgtctttgaggatcaactgcaggactgggaaacagcgaaagctgtgggcattccaactcatcttcctgttccccaagaatggcagagccatctacccaaaatgtccactacggccacactcgaatacactatcttgcgaggatctttcgctgcgatcaaaaagcgcattgatgcgctgcctcgctggaaaccgctctccgacctcgcttgccacctcatcgtcaaattctcccgcaccgacatactttcctatctcacagaaaaccacctggaccttctctggacaacctcccgactcacaaatattccttaccgggcatccgcaatctacggcaacccgaaagtactgacatggtggcgcgatgcgccagctctccccaacaaagagtacatggccgacgccatggacggcgcctcacgagcaggatttatcgacgtcctggattggtggctacactcagggcttccgctaagatacagcgaacgtgctctcgaagctgccagcgccgaaggtcgagtccccgtacttgactggtggaaagccgcctccgccaacgccccactgtccaaccccttacctctcaaagtcggcaaatccgtcctactcgcagcgcagtcgggccgcatcgcatctattgcttggtgggacgcgtcggggattccttacagccacaccgagaacattgcgcgcatcgcgagcacgcacggccatgttcatgtcctcgagttctggtataaactcaagggcccaaagatgatctttgataaccaggtgcttgtgggccccacgaagaatggccatgacaacgttctacagtggtggaaagactgcggtatgcgggttgaattcaaaacttgtgacattgaagaagcgcttgaagatgcggatccgagctctggcgctgaggatcgtgttcggcgttggtgggagcggaacggactgaaccttggagttggcacgagtgagtggatgagatcgaaggttctgtgagacttcattttgcatcactgcatggcttgcgctttcggtcttttggcgtcttgggaagggattcatatctcctcttctgttcctgcggttgcgttttgttctttttcatatcatgactccagatgatgacgacgtataatacccatttgaatgttcacaattttcacaattttcatcgcgcggtagagcttcgagtttgttcagaagctctacaagtaatatatattgtctgtgtttaaattgaatctacctcttacatatcttttccatggggcgatagaactcattctcatttttcaatctagaatcaattataatctacaataattcatgtgaattgactgcaaagacctgcttcatatttactttatattcagcttcaacttcttgagacccgggaatgctcccgggccatagttgctgagtcaaggcccagctcgccgccgcggctccaccagtaaatcgcaaacatccagcaacctccaacctaaccaataaattgacaatcaattttgctgatgttggcaagctgcgtcctgcgacgcgtgctgcgtgcttcatgcccaagggcaatattaacccgcacgcgaaaagcatcatcaagtccttataacaacatcccgtcaaatggcatcaacggcctccacaacattacaagaaagagacagagcgccgctcaagatatccgaccaaataaaccgcgcagtctaatcacggccgctattccaagctttgctgtaccacctctcatgttcatcgggctcctactcggtctgtggacttggaaatgcttctggattattgtcatgcaaaacaagctcctctacctctcctggttacctccattcacaagatcagagtctatttcagattacaaagctgagtgcagaccggtactgtgggaggaaaagcagattcgcagtttggatgggaccaaattggctgtttgtgagggtcacattccggttcctcccagggaccgtgagtctgttttgaatactgttgcttcacaaaatacacaccaggggaaactgatcccgaaacggaaaaattccgttgtgatctgttacttccaaggcaatggcggatcgacccctatgcggttgcctcttctctctcatgtcttgcgcgcaattgcggaaacgtctagatcggatccatctcctatgtctaactccaaaatctccccatatactattgctgccctgtcataccgcgggtactggacatcatccggccgcgccacacagtccggtattgagatggatgcccaggcactcttgaattgggtttcagaaacatatgcgtccccagaaactgatcttgaaattgtaatttggggacacagtctgggtgctgctgttgcaacctcagcagtatctacgtatattgcccgccaatgtgagggcaaagcctcaaatacaggcagcaacaggcccctggcgcctatttctgggctcattttggaggcgccgacatccagcgtgaaagatatgctcatcagcctctatcctcagagatggcttccgtacagatatctttggccgttctcttggaatacctgggatatcaaggcgaagatgcagcaaatggctacttggagagaccaaccggggtctcaagtcttgaatgaagctacgacatcaataccccgctcgcttccgccaatttttcttctggctgccgagaaagatgaagtcattccatcatacgtaccaggccagttagaacaacatgccaaatctctcggcttggagattgagaggaaagatgttatgggtgctatgcatatagaggcaccactcaaactggatggtaggaaagcaatggtgaaattcatcctaaacgtcacatccgtgcctagaacataacataataacctcacgagagatacaatatagacgattgaaagtatatagtaccttactcccacttctcaacacgtacgtgcttaatatccgcatccttcataagcgccttaatcttctcaaactccttagaagcctcagactccccgaaagcaaaatgatcctggacctggttccacccgctaaaaagaacaaactcctcatcttcgccctctttgtcaatgcgccacgcaccgcaggaagaaaacggagccgtgtaggcattcaaatgggacacgccattcctgaaaacagcgtcaaactcgcctttcttgcttggctcgacaaagtatcgagttatagcgagaacgggtgcatctaacgggattttggatgtaggtggctggatccgttagcctatatttcttggtaacacccttgacctacgaaattagttcatcgtcaggatcgaagagctcacatcgaggtccaagtgaaacatccagctaacatcaagactgtccttcaactgcgcgagcagggcctggttgatttcaaatgaaagccactggccttcgcctgtatgtttctctacagactcccacccacccatcaggtagacggatgatgggtcttcgatctggcggaggtatgtgacatgatagccggagtgtgttgattgtttctcttgggcttctatgaaagtactcttggcggaagacgaggggtcttgcgcttttaggcggaggagggcgagttcggtcaccggcatttttatcttctctttgaatatatggcctgtgttttggagggattgtttagtttgacctcgattactggggattggacgttgttttatatgtctgtctactgagctagggtggggggcgctttgtaggcagctgttagaggcgtcatctagctaattctcggacccatttgactaatcggggattattcaatgtggttcgctggttttatcactagtggatgtctctggatgtgtgactttatggctacaagctaagggtttcttttaaaaagtcagtatatatctttgccacagaatttggaaaaagggtaaacgaaattgcaatgcgatcattcaaggatatacacgtccgagacaccagcgatcaaaataaatgttaacccttcagcacacgataaccaatgactttgggtataccgatcaagcaaaagactagacaatgtacgaaagaaacgaaaatcgcaaactgcaaagtaaagatcatccgaacttgcgcattggaaccatatggatcagacctctttcctgtaggggcattaataacatgaggtgtaatagagagaaaaaatgacgtaccaagtgagtccagctttctcgatgcccggggtcttaatagcattcctgtccccaaagggattgtcttcatcgtcttcttcttctggctcactctcgctctcaaagattggacgtgtgtgttttgacgaatatgcaagaggcaggctatcagggcgattcggccgaggtggctttcgggggttgatattaagcccggcaaggccgtcattcatgtccgtgtcttgcagaccaagtccatgtctttgcttccaattgccttccaaaatgtcatcctcactatcactgtcataatccacgctcttgtcgagcacctcgaatgccatcaatgcatccaccagctcctcatttgcatggatcaggccgcctaggaactcttcggtttctatatactggatatatcgaagaatgctatgacgaagctgcttgcaagtatcgaatcggttaatgcactccgcatcctcacccactcggtgggtctcgcgattgacgtgtttaagggcattcaagaggttggtgctagcgacggaagaggcagcaagggtttgcaagatctccgggcgctccttttccatatcaaatctcctgtggctaattgataatttcttatctttcttgactttcctggacttggatttctctttgggactggtcagcacagtggatggcccactgcccgctgacacggatacaacatgacccatcgggggctcgtttgaattcgaactcgacccctcgcggagaaccttggctttcgcctgtgtggcaggctgctttttgggaacttgcttgtatagcgccgtgacccttgccatgccaggggtgtccttataagttgtcgcccattgtccaaaaatctgtttacatttctgcttcacgagtggatccgaaacggaatcagtagctgcgatccgcagacgttcgagcaatgcctcatcggcgaaatcacgcaagaagcgttctcctgcattttggacgaggaagtcgagaatagtaagcgcgcgcagttgtcgatggatattgccatattttctgaactggtcagactgattctcagcactttcaatactcatggacttacagtttcttgcgaagagcccgacttgcttccatcgggccgctggcctggatgcgaactacttccactaaatcgacaataccgctggagtcttcgacttcatattgctcgctcgtaaggacctcaatctgtacggtcactgccgagtacggtttctaacagctatatcagtcggtgctggaaggatgtatggtcttcacccgatgactcacggaggattgaaacattctgccctagccaaggtgatggtttcgaaaactgtatacttgttttgagtaggagcaggtctgggaatggaaaatggtccctggtatcaaaagccaatagtcaaccccacgctgcgatgtcggtatataaatgaccccgcacggcgctgtttacaccaacgcttcacaggaagcgggtatgtatggggctttcgacggtgataggaagcaacttgattcgctagaaaaataccggaaagggatcaacggtgtgaaacacaaaataagggttcaagaagctttcgcgataccttcacgtggtgtacgtggtgtacgtgttgtaggtgacgtcggaggccccaggggggtctcggcgcccgttaatatgataagcgcaatggaactaccgcaaaaatgtaaagaatgttttggtgtttctcagtttgtccaacagggcatccaaattgcaaaatggccttgttacaggggaagaggggagatcaaacaatgctgagacagtttaagcttatcggctggccaaaaggggattagggcggggtctcatgcctgaggccaaatttatgagaaagaagtcattgacgactttaaaagaccagcaataaccaataagacctcgagaaagaaagaatagtcaatcctgactacatttcttgtcaattaatcttgaatgaagctctcatctgcacaccggacggacccatcccaacgctcatatttcttacgcgtactgtcccgcttcgtggtctgctccacccttattctggccgtcagcgtggctctgaaatcccgctctcgtctctccctcctcctcccccacctctcctacaaccaacctacaatcatgtcttaccaacaggaacgttacattgccgaattggccgtccagagggcgtgtctcctgacacagaaggtattcttcgagaaggccaagggcacaatttccaaggacgacaagtctcccgtcaccattggcgacttcggcgctcaggccctgatcatctcggctctccggaagaatttccctaatgacgagatcgttgccgaggaggaggcgagcactctgcgtgcggacaaagagctcagcgctgagatctggcgcttggtcaaggacacccatctggaggatgcggagagcgagaatattctgggtggacctctcaccagtgagcagagcatgctggacatcatcgatagcggcaacagtgccggtggtcctaagggtcgcatctgggctctcgatcccatcgacggcaccaagggtttcctccgtggcggccagtacgctgtgtgtcttggtctgatagttgatggtgacgtcaaggtcggtgccattggtactccgaacctccccgtcgatggttctgcccccattgctgccagcaccggtgatcagcattccaaggctgccggaaacggtgtcctgttctctgctatcctgggcgcgggtgccatcagccgtcccctggccagtggtcctcttgctgccagcaagcccatctccatgcgctccgtcgcgaacatatccgacgctgttttctgtgaaggtgttgaggctgcgcactccgcccagggtgacaacgctgccgttgctcagcttcttggaatcaccgccccgagtgtgcgactggactcgcaggccaagtactgctctattgcccgtggtgccggtgacgtctacctgcgtctccccgcgaagaaggactaccaggagaagatctgggatcacgccgctggtgatctaattgtgcgtgaggctggtggccaggtgactgacatgcacggcaaccggttggatttcagcaagggccggaccttggctgtcaacaagggtgtcgttgccgcccccaaggcccaccaggaacaggtcattaatgccgtcaagaccgttctgaagctgtgattggtttatatattttttaatttgttgcctcttccgctacacttgagctcctggggagcgggatcagtttgaagtagatttgtgataccatcgcttgaataaaaaaatacatatgtgacgataagagtacaaaacacggaaccaaacacaatgtcccgcgtagctgaaaagaaaggcgcctcccgtctatttgatcttcttcgccttgagcttgatagtctctccgttgacgaagatacccttgcccttgtacggctcgggccgtctccattctctgatttcagccgcgaattgggtcacaacccgcttgtcgacaccctccaataggattctggtgggctgtggtgtgctagccacaacgcccttgggaatacccagttcaatggggtgggagaagcccaccttgagggaaacgaatttttggccggggtaggcggcttggacggtggatgccttatcctcgatggtcgccctgtaaccgacaccaaccatactcaagacacagacgtggccttcggagacgccgaggatgtgattctggaggagtgcccgaatagttcctagacagaaaagcaaagtgttagacattgataagttgccgtgcggactggaccgccgcggagaaaagacaggaaaacataccccacatagcacgctggtgagggacagtctgatccaagactgacaaactagccttctgacctgtctcgtcgggggtgatagtgagaaatgagggaatgctcaggctcatctcgcctgtgaatcgggcgagttagcatccatcggcgggaccattaagcaataacacattacccttaggacccttgatctcagcaatgaacttggggatatcctttcctcgcgtccgggtgagagtcgcggggatatcgatgagcttgaatgacacctccggggggatggagagcgcggcacctccgattcgggactgcgccggggatgtggtcgagaagcattgtgtgcggggggagaatgcgggcgcgaggaagatgggtagggagccgcgctggaaaggctctcgaagaagctggcgggcgcagcgttggggtatggagcacgacatggtgacttgcgcgtgtttggtcggatgctgcgttgcggactttggattttgttcgaagatgggttacctcaatgggtttagcgtgcacgtgattatctatatgatttcttctttttatcaggttagaatatcatgatctaaaggtaattatgctctcgactacaggaatcaaatattgggcttgattgcttcgggaaatacgcttgatatttggtatttctcatttgatgcagaggttgttgaaacctagtgcctaacaacatccgagaagcgacacaatttgtcccaattgaaattgattccttcacataccgacattcttcgagatgcaacatctctgtcgaggcctaacacagccgagactctacatcccgtagtagctgtgtacaaaaggcatagtgagattgccaccgactagatctccaacgctacacatgcatagaactgtcatatgtacgggcttttcatcgctattcatatctaacacagactaaaagtacggaggcataagcagccaattttcttgtcacatcatcgttatacaccagccgggctagtgttagtctcgggaatattctcggtttatacgacagttcgctaaactgccctctgactcctgaccgtatattaacgatcgcattagtattcggatggaaatttcttctttatggacaagtaactaaatggtgggaggaaactattcaggaaaaagtaaagcgagagttgggcttgagctaaaacaacttgaatgtcaagtctcactttcgaaatcatccttcatcctcatccatttcttcccatcctacaccactcttctccctacctttatacccattcatctcagacaatatacacgagtgatcaaggaccagggcccgtccaaagctacacacactcgtagaagcagccataccattcactatgagggcaaccgatcgcttccaagtgattgcatatatcttcctggcacttacacacctcggtcgagcaagtgtctcccaacacagtaagccactcagatacgtctcaaatcattttactgacataagaagatgtcccaattcttgcaaccagaccaccggacatcgacacggtctctttcctcagttcccgggcgcaagaccaagacagcatcttcaacgaagccgtcaaaatcctggactcgatgcaatcttcaccctcgtgcaaccggcttgcagcgacaaaactagtgaactcgtgccaaacattcagcgatggcaaggacggcacgcagacggataacccagagactctcgacgttctacgatccgtctatgcagtacgcctggcattgtgtgagatcgacggtgctggtacccaaatgcctccctcgtgcctccctgttactgtctcgccacctccacagaagaatcgatttggctttgtgagtcgacacagaggccccgaccccatgtcggatgaagttccaaaagaattattggagcaatgtctgaggacacttgagtcacgaccccagtggtggacctcttacagcaacagccgacagaatgctcttgtgatctgccatgcctcgcgaatcgagacggagaaagaggagcttattgagcttcaacgatccattgccaagagcagtctcaagctcaacaatgggcttcaagaggcgttgcgaaatgcaattgcacagtctgcgcagcagcaatcattcatacatgctcttcagtctctgcaagggaagatcgtgaccgatatggaagcgacagactctgtgttcaaacgaacattcggcaaattccttcgagaaatcgaagctggaatctggtcgctgcaagattctatatctgaggctttgtcgaatgtgcgggctggaactggggtcctcgaaggggtacaattcgagcagctgaatgagttgaaacatgtactaaaatttcaaccaggatatccggaacttatctactcaagttggagcacttcaacaggctctacggagtgcacatcaagatgcaatgactagaagccgagagacgttgctagctcaagaaaccaatgttgtcgcccagaagaatctcgcatcatctttacacctgtcgctcgagtcacttctggactcagacatggacaaactgtaccaaggcatgcagagattcgatgctgctatggtgtgtgaaatatacatttaccatgtagtgacactatgagactaatctcttgcccctttttgtaggaatggttggccagccggatgaacatgattcttgagcaagaaaccaggatgacagaggtacgagtacattcctacataccggctttctcactgactttgaaagcgacttcaaaacatggaaacctttatacaaagatccgaatcgaaggcaagcgagctacaaaaggcgcaggaccaacaaacagaagcactatctgcccaatcgcgggcccaggaggccattcaattcgatgcgcaagtgtcgcaagctttgctggccaaaactagtgttgctgctgccaatttacaatccgtcatcgacgatgcagcgttaaagttcaagcatgtcccgggtttcggcattgggggatcctcggcatggtctatctgcgccgtcctactcatcgtccttgccgcccagaaccttaagattgcaattgctttaatttttctcattttgggtaggtgtgttcttcatgatcaagagtgattggtgctaatataaggaggattaggccattctgttgcccttattatcttcaaatttctctagttatacacacgctgcgcaatgatttgcggaccagataccattgataccccagctttatttctttttttcttctattttcgctcctatctctaccatctttgcttgcagcacatcccctatggtcgttcattgcctctagatctatagcaatggaataattcagtcttcttcatttgatagacggagtacggagactcggaggagctatgtatccccccttttcgctaattatatgaaactaaatagacggattgtttcagaaaaaaataaaatgaaagtgcaaattagcgctggcacagccacaatcactagagctgccagaggataagcagcgggatatgacccatttacatcgcagtcagccaatgaaagcgcgttctcgacacagtggaaacaacgcacgagaaaggcaattccccaaaataacaaaaacggcaagtcaataggcatagatgggggcagtcacgtgggagtaaacagatcgactgcgcgcttctcctccttttcgattcgcaacacgttcctcatcgggtcttgattcacatttatcaaatatctgtctcatccaatctcaaacgcgttgatcaaaatgcctggtgttcgtgagtgaccataactacctcctatacttcccgacccaacatttggcgcccgtcggaaccgcaagtaaacagcgctaacgttctccagcacccgacgctcttcagcaggtcaagaagggcttcaagcggttcttcagcctccgcaagaagtccgctaagaagcagaaggccgagcctgtccaggctgcccctgctgagactgctgcgactgctgcccctgtcgccgccgttccgaccactgagacagctgccgagaaacccaccgcccccgctgccgccccggaatctgccccaggtatgacattctatcagtttgatatcaccttcgtctcgcttttggctcccaactaacttattgacctactctagatgctgccaaggtgcccgaggtaaaggatgcaagcaccgcggagcctgtcgcctcccctgagatgaccgctactgccggccccatcgagactcagtacgagtctgagactgctgctgctgcccccggccctgctgtgcagtccgatgcccctgctgctaagcctgaggagtctgtcgctaagcctgaggagtctgtcgctaagcctgaggagcctgtcgctaagcctgaggagcctgtcgctaaccccgaggccactgctgctaaggtcgaagagtccgctgctaaacccgaggccactactgctgcgcctgtggagcctgccgccaagaccggttagtcaaattgtcttcacgatgcagagaataatgctaataccgatgttagatgcgcccgctaactagaagtgtgtatatccacttcattggccagaatggacctttcttcgcgaatctgatctaacttgcgagtgcttttttcctgctccctgtttcgtttcataccctcagcgttgtgtattaatcactttcagaaagcgatgcgttgcatgctgtttttcttttcttccatatcggcctcgatcagaccgcttaatatcatgcaaagctctactcattcattccagaatcattacgcgacagtaaaacccccgccttaatctggtatattatgctactaatgctgacagcagagaagaaaaaaccaactcgcccacgggtatcacattaagaatctatgctaatgctgaacagtttcattcattcccgtctgaggaatgatcatcaccatcagccatagcgacatcttcaacactgacacccgccgctgcagccttcagctctctcgctttttgtctgcgcttgagtttcctatcgcggttcttccgagtccgcttctctgcttcattttccttggcagcctgtgcggccgcaacgcgcttacgtagctgcactcgtcgcttcttgcctggcttcttgcgtgtaagtggactcttagagacgggtacgccctctaccacgtagactggaagactgttggctggccgtggcattttcgtctgatgtcgtttgagatggataactcgccaggggagatggcagccgggctagaaattaagttagcagctagacaatttgccagacgggtatggatttccttacccagactaaggaattggcccatgtcagcatgtgctgcccgctaacggccacgtcctcaaattgtttcttcttttccgctatccggctttcgtcttcggtggtaggttccccgttcctcgtgccttgaagagaaggtgtcgagaagtaataatcccacccacggaaggctttcacaaatcgtccctcagtgctagcgccagatccgggtgtaggtgaatgcaaccgaatcctcaatttttggattgtgggggcctctgcggcctctgcggttttctcatctgtatctttttctgactgctcggtggtatctttcgttgatttggcaggggcgctgaatagccggaactcgaattcttgttcctcgtcttcattatccgccgcttgcgagggatcattctcttggctagctgtctgctgtgcagtatccagttgatttaaattgagtagctttccaaggcgggcgtatgcatcctgggcggcgtcgtcgtctggtgctggtgattgtgagcgggatgacgctggagagcgcatctcatcgcggcggacgctatataagccggattagccgctaattatatcgaaaaaaaccagggtggattgtttgctcacgtaccgcttagcatttggtagatcgaacattgtgtggtgtgtgtggagaggaataagactaaaatcccgaatcgagaaaagcgatgtttcacgccgctctacggccacggcctgatgacatggcacggaccgcccagcctcacggccctcaccttccgactttgaaggccttttgtctacattgtgactctctactgcgccatttgtttcgtttcatattctctgttttctgcatattccacactccttaccttccgatcattccctcgctggctccgacaaagggtacctgcaccttatctattgggttggttgacgcctcgtgcccatcgcatagcgcaaacgtgcagccaagaacatcccccgattctagtactcgatctcaatcctcataaatgggtatctgtgcctcctgcctcggcgggaatcgccacgactctcctgaggtgagtctaaatccgaagctagtctctttcccgttaccatgttcatcgcgcattacctcggtctgatgcgcgatgcgtgggggttctagtcgcagagtgcaattgtctaacatttctttcttcaagcctgaatctgaacgtctactcgatgatgatccttatcaggccgggtatggctacggagcactcaaccatgctcatcaggctagccagccagattcggaatatgtgaggcgtgagagggaggcgctggaatcaatctgccagcggacatctgagtgagtatactgtcctagttgccttctgttcatatggagttgaattcatgctaatcgtgtcccttagctctgtcatcgatatctggtccatccaaccacaaccacaccttcgaccccaagcaactctccacacccctatctctgcatctcccgtcccatcacaaaggaccgatacaacaacacctgtggtatctacgcaccatacatcaccgccaagccgtcccacctctggctcgtcaggcaccgtcccgaaacactggggtgaagttgtcgtgaacccgaacaagaaacgatctcgtaccaatatcaaaacggattccaaagccagccatgatgtttttggggttctcaacgtcacctaatatgatgcgtttggggcatgcatcgctgcacattgacgatgacgatgtacacgacaaacgagggtgtgggctggtgaaaataaaatcgaggatgcagttgagggtactggaagaccgtttcattattttcttgcgccatgctgttatttttgggggttttttgtttcttgcattgatcgcaggtcgactgtctttcgcacatagccattcattcctctctcttcctggcctgataatacccattggcgcagactctttcttttgttatcagattcttttctgtaccccatgttggcttcttttatgttggcgtgtttttttatttgctgagtttgtttctttgtcttcatatcatcttgttcgtcgtgcactgcttgtatatgtagttctcttttgagtgccggactttattctttctgaattgacacacaatttggattatgtcaagtgagtctcaggaaatctggataatgtacgtagacttctagaatctcaacccatatagtagttcagcttgaggtgggatggctttttatatagaaagtatttcagtttactatacaattgagatatcatgggaaattataaagaacttcactccccatacttatgagagatcggcatcaattattcaacctgtgactccgccgataatgatcgtaaatgctggactgaatgccaatgacaagggggaaaacaaaaatgggattgacagggaaaagaaaatggatacatgacaactcccctatgacagaagaaaaagaaaacgcccgctgatatccagggatggacatagaagagagtaggatgatgcaatatgttcgtgccgggttgatcctaaacctgacggaaatgtcaaactgcagaccattagacatcgtccattgtacccgcaggctcttcaccaccagactcgtagctccccgccgagctgagctcatcttcagactcggtgtcctcgcctgcttcatccacagcctctttgctggcgtacttgtcaacatattctaggagcgagcggtcagtatggtataatagcaaacataagcctttgggttgtaacacacctttcacctttgcctcatatgccttgggttctctcatcatcagcgcagctgcttccccgttgagaggatccgaagggttgggatagcggaggagctggggaaggaagacctcgaagatgttgagcatgtcatacatcggcgaccaggtttggttgatcacatcgagacagactgagcccgaactatagcagaagaatcgcattaacctcaagagtttcatttccacacatgtcagaccacgcttgactcacagctcatcgatgtttgggtggaagattcggttgacgaatccgatgctcgggcttttgtatgggtactgatcaggtaattcgacgtgaattttccaaaggcctccggtaaatggtgctagaaaggttagtatgatctaatactggtcgattatgaatgagacatactctcttccgggcccttgaaacgaacgtaaaattcttgcctgttgcgagtagttggtatcggagagcttcaaatggttgattgtggtgtgttaggtacatacactggagtccggagttagtatagatctatagctgacagagggccagaacttactgttgtcattgaccagtgtcacctcatagtcactcatgagcctagattaaccgttagtatatttcccgtcaaccaagtatgcttgccgagaccgatcaaaaacgttcggagaagcggcggcgaatttgaaagggtagggagttgtcggtcgtacatcctagcgagaatgttagtgccgtgtattttgaacatttctgaacttctagagcatacttcatgacctatatgatgaacaaaaaagagttattagcatctccggcgactctgggggcttatcggacgatccgcaacattactcacatctgtctcgattctgcgctttgggctactcatgttggtggtttgaatgaaggagtattttcgatctcgaaggtattatcagctgcaggctctcacagaaaaaaataggcccagcggtgtcaaatgccgtgattcgcaagcagacccggaggcggagcggggaagtaatgggcggggcagacgatggcctttgaaatagatgttaagtaattcaggggtcggtgattaagtagaagcaaagtgagagggataacagatatcagagaaggcttcacttctcccgagcgaaggaaatagaaagaagagacgagaatgaggtcttggatgaatgatccattagatcgggcccgcggacagtggacctgcccgtgtgatgagtcgatgagtcagcgcctgccggggcccggcgccatgacgatgacttgggataggtcgatacacttctacggtatataattgagaacataattggttcatctttccatgatagtattgtagggttgtgttgctgtaggcatctatatcgtgctacatgaatggttgaactttagttatacctctgtgagtaattctcgcggccattctatagttacactctttgaatagtgtttccgacacacatgcacaaaaaagaaagagacatgcgccctgtacgtcctatatgttgtagaaagtgtggatcagatgtcatccatagctagccatgtactccctactaataggatacttagaacaagaggcactgcggctaccattacagaagaaatccttctgggagagtaaatagcattttctttcgattgtctaaagctctttttttttctgatcagaaattaagcaaaactgggtcatactctgttacctaggtccctccagttaggttaggatgggtcacgtggctgcctcagctacagcatagtatcatctctttcagctatcagtgcaacaatttttggtcatgtttctttcttatgtctatgattacaggtttgaattctagcatacaatgttatcggtgagctgtatgtttggatatgactgtagtatgtcggctttgaaaaagaaaaagaaagtgtaggtaactattgcatgtctcctcctgaatcctatgattgggaataaaaggggcatatataaaaatcgtgggacaagatgatacactcagtgagcaggaccatatacatcaacgttcttctgaccaaagtgctaccactcatccactttttaccatggccaccgaccctttgaaatataatggaccaaatcaaatccgaccctatctgatgaacgtcttgatgatgaaacatagaaattgaaaagtcacacgaatttgtgtcgggtgaaatgtctagggaggtaaagggtaaagaggcacgatatacagctcgaaggcatatctggactttatataggcgcaagctcagaataattatagcctcgatatttcattgtagatctttgacggaagaagtcagtataaatcaaaatatcatatggaaaatcttcaatcaatttgagtgacgtgcgaaatactgcgctcagcttcttcttacgtatctagttgtataaattctgaagtcaaggggagaaggtgatcacaaaccactatgcgctgatatctaatgaagtagtagttgtttgtttatatataaacagcatagtcagccctcgagccattcccattcatatgccgctatatatcgcgatatgggacttgaacaattctgatattcaatttgcaaggatatgagaagcatttcaatcgaatctcaactacgatatattctataaatgtctttgtgataaccagtggtaaaccgtagaattcggtgacgagcataattgctataaaccaatgtattcatgcatgtgtgttctctagcggtgtaaatgtgtatgtgttgttagctagacttccctgataaaagcccaactgtagcagcttaactcgcagcaagtatcctcctcttcgcaaatcagatactagtgatcatgtttacgtctgctacgggtgcctaattaagaccgggcccgcaggaacccgctgtacgggaagaaagcgattggttggaaagtggaaatagtggggctgttgcctaaggttgcctaaggatgcctggacgctaacgctaagtggatgtcaacgatatgaacctaaacattcgaatgttggcttcctctttatttaagacttcgtctccccattttgccagttgatatatccttacgcactctgattaaatttgcaccattctcaacatggcttctttgcccaccctcccagtgaagcacaatgacttcgtgaagtatgtcaacgccaacttggagaagcccatggtggacttggttcagccatataacgagtttgacgccgttctgcgaaagaaattcgcccaagacccctctcatccatcaattcaagataactatgccaacattgtaccgctgtatggccagaccggttccacaaatatttccattcgagctcgagaccttgtctcagaaacgccagagcaaacggagaagtacattttgcccttgagtgcaaaagaccggaagccacatggttctgcggcagttgtaccctctttgaatgagttcaagaacaactttgcgctctttacagagggctcattgagtgaaattgactggtctaacgtggtcgctgctggtagcgctgtcgtcacctcacttttgcctgtaccagaaaaatatcgcaactcaaagcgtggccttcgcaagtactaccatgaggagtttgctccagcgtcagatgtggatctcttcttgtatggcctgaatgaggaccaagcgattgagaagatcatgcacatcgaggataagatcaagaatactatcctctatgagaccacgaccattcggacgaagaatacgattaccattgcttctcagtatccgaaccgccatgtgcaaatcgtgcttcgcatctaccgctcagtcgctgagatcctcaccggcttcgacgttgatgcttcgtgcgcggcttttgatggtcgccaggtctatgcctctccacgtgcaatcgctgcatacatcactcaagtgaatcggattgatctaactcgaaggtcaccatcatatgagaatcggctctccaagtattcacatcgaggatttgaggtcttctggcctgctcttgatagatcgaagattgacccggtgagaattgaatcccttggacgagagggatgaaatgtccgaactaatttttgagatagactatcttcgagagaagttttaccagaactgaaggacttgcacggctcctggtattggaaaagcttcctcggtctcacgaccgggacaactacctccaaaagaggcgtgaggaacgaggtcgtcctcctttgagtttgtacctgaaacgtcgtcagggtaaaatgctgcatggtaatatcaaggatgactgggaggatgaggtgcccgaatggcaagagcaagaccaagtgtccgattaccatacttttgttcgtatcttcaccacaaccgagcttactcccattcgactatcactgaccctctgatagactattccttacggtcggagattcaacgccaggaatatcgagaagctactttacaccaaggatctgttgctgaacgcccaatggaatcagcccaaagaccgcacagtttatcttcatcgtcatccagcattcttcggcgaggcggaatatgttattggcgactgctgtggctactgtcccaagcctgtcaccgaggaggaagtcaaggtcgctgatgaggagggcaagatttatatctttggtcatatcactttcatcaaagatgatcctggccgccaggaaattggaagtttcaatccgatcactgaaaccgattggactggtgagtgaattgtccgaaatgtttctttctttctgaattatgcactaataccaatatccaacattgtagaaatggcttatgttggccgcaccgagaaactttgccaggcaatcttggcaaacgatgttgactccgtgaaagctttccttgcggatgagggtaccgatccagaccgtcgtgactacactggacggacaccactccaactcgcgtgcatatgctcgacccctgaagtggttcaatgccttgtcgacggcggtgctcgcatgattccccgtatggctgatggaaatacagcgctccatcttgccgccgcccggggagacgtcgacatgattcgaatcttactcacaaagagcaatgagaatgaagaagaagaagccaagaagcaggattctctgaaacataaaggagagtcaaagaccaagcccagcacagacgaggatgaagatatcgatatgattgaccaagacgatgccatgtctcacacctctgcctcttacgtcaaagtcgaaagcgacgaaaagaatttgaacgtgtatgatacgctccaggagaatgacctcgagccggatgtctacgacattaatgtcgttgcatgggatagtcggactgctcctttgcatctcgctattctacatggtcatactgaggccgtgagagagcttgttacatccttcggtgccgatgtcttgatgccaattaaaatcctgaatgagcgcgacaaaacaccccaggctgcaattcttaacctggttcttgttcaagtccttccattcgaaaaagcaatggagatgtcgcagacccttcttgagctcggcgcttcaccagcgcaagcagacctcaagcagaagacaccgctacactaccttgctcaatccgacaaatttggaatttttgatatatacgtgcaacatgatgagccagcagtaaagcgcgccatcaatcacttagcagttcagggccattcctacacaccagaattctcctcggcgttgatgtttgctctcactgcgcagaacgcactcgcggcagccaagctgttggatacaggggcctacccgaagattgatcccgcagaggttatgaaggctattacgatatctagaggacgcaggacctactacggcgtcaccgaagaaaacgcaaagtattgtgtgaagcagccaatcttgctggctattgagaatgacctccctttactcgccattgatctgcttcatcgcggggtaaatcctaacaccgatatcagcgaaagatatcgaaaccaggatcggacggtattggacgtcgtgcgccaaactttgcgtgaccttcgtgaattcttggttgtgcgcaagtaccaatcctatgctaattccatcgcgactcccctcgatccgaatgacgatacatatttgtcagatttccaacctggcacttacaaaatggccattgcaaaggatctactcggcaacgcgcgcaaggcaaaccgagagaacgaagaacaagccaagagggctgaagctgccccggccgatcctcctggtttggctgagaagaaggcgtttattgcggagttgatttgcaactacgagaagctggagtccattctgctacaaaaagatgcaaagacttgggccgagcttcatcccccgcagacaattcccgtgcagttcccagtccacgtctcgaccgagggaacacagctcacctccgagccttggaagatcaacttccacttcaatgtaccaggcattactgattctgctcgtgacggatatctgaaactgtatgtgcctccttttatctcacaacctaagaatatcccactgacattgatataacagtttcgaagcagcttggaatggcgacattggtaccataaaaaccttgacattgggcatgtggggacctctcaatgagaacgctccgcttgagattgctgtaaccgacaatcaaggcctgtctgccctttcaatttctatcatgcgcggccatttcgcagtggctaagaccattcttcgaattctccacgtgcagtacaaggtaaaagcgcctcgcggtcggatacactttgagatagatgtcgatgagtgttgtgatgactgtgatgactctcatgaagagaacgaagatttgaacatagtcagtcacattgttgatgataccttcacccacgagaacatcggtgaagttatgactcaagtcgagagcaatacttctcctcttgagacgttcgagaaacggttcaatgtcttcctgtttttcgacgagtgccagaaggaggattggaacaagcgagccctcctgtttccgaagctgcaccggcaccgggattggagttggatgaataaagacaactcgatcaacaagattgggttgttgaaatacgctgtgtacacaaacaacattcctcttttggagttccttctgaagactggattggaccttgcctctaccaacccttcggtaaaaggtgagttcttggtcaaggtcgacgagttccagcttgcaatctcacttggacgtattgattgccttgccaaaatgattcaaagtactggagctggtcttccacttacaaaattgagtgatgactgttgcgttgaggagaagaaagagcctcagtactaccctgggttgtcgattcgtggcagcaagcgtgctgattgggctaatgccggtcgagataaaccgttaaaagagcgggcacagtgtcctcctctccttattgcggctcgtcagggtaatttggctagtacggagtttttccttggtaccgcacctgctcgctattacttggagtatctcaattcgaataaggatgatgagagagtcaaacgattgactaagtccaagctcggactggaaggaacactcttgacctggcttcaagaaagaagtaagtgccacctattcaggaacccggacgaacatagctgaccatataaaagacaacctcgttatccactgcgcaatcatctccgaaccaaatgacgaatccgttcgtctagttcagtatcttgtggatcatcaccctgaatgcttggaagtccgatcgacagagggattgacgcctctcgcctgggccatgtcccttcacaaggtccgatttgcccgcatcttggtagaagctggagccaaccaggctgtccgcgacaaagaggcgcgcaatctcctccacctgattctcgtatcagccaatggtcgagtctgtaggaactccagccgatgcagcaaactcctagacctgctggataagcaactcctcccaacaatgctcatggaacgcgccggtaaaggctcaaggacgcccttttcccgttggcttcacgcccaacccgactttatgccaagggacccggccattcctcggccccctaagagtccccagaccgaggatgagatagtaacctccatgacgagcctcattctgggcctagccaactccacggaccaaaagcatctcgaggtctttgacgaagctggaaacacacctgttcatgatgctgtgaagaaatgcttcccccaagtccttggacaactccttgatcgtcgtcctgacatgctcaaccgggagaatgccaccggtaccactcctcttgaaatggcagttgacgcttgggtcaacaagagtacctctggaccgcctgacggttctccaaggtcgcgggttaatccccctgtgagtcagagcgctttgcagcgcggttgtcacttattcatccccggtagcagggtcacgtatgacaaggagatggctacgcttcgggtttgtcgggaatgggcccaacaacgacccggaaagagaagacttgttagtctgtttgaggcgaatgaggtcgctaagagattggtggcggcgggacaggctactggccgtgatggtgttgtctccgaagatgataataagtctgaggatgatccgtggggaagcatgtttgatcattgctagtttgcttgtattgaacatggtaatttctagcgcaatgattatttgtactgaatggtctttcttttttgcaatatatcctaatcatatctactgcttcattccctgtttctagaaattccagctacttgccaatgaacattcctgtagcttcttttccactatatactggaactgaaagattaagaaatataaatactcaaaagcagtagattatgatcacctcaaaaaatatcatgaacttaaccaacccggcttctgactcagtgctgctcctcgggtggcagctgaaccttcactgcactctccgccagagctctgttccgactattcttgctagcgatatacgaattaatatactcgggcacttcagcgaccgtaccatcaccgcttggaaccggggtaccaaacgtttcccataccggaacaacaccagtccagacactaccagtaatctgcgcgttgcctgagtccttacgctcatccgaaacaccaccatcacgaatcttaccgctgccatccacaatccttaccttcaggatgacagtcgactgcatctccgcacgatccggcggcacacgcgagtgatcccagcgatccgcgaggacagagttcgtgatcaatttcatggcccagagcttttcttcatcatctgtgacgagggtcgcatagccgtgtaggatggcagagcggtagttgtagctgtgcgagttgggcgtgagcgataggatcagcccgtctactttgcttgttgcgacgcatatggggagtccctcgccatcgctgcagctgcgggccaggttcataatccgtgagctgacgtagccgtggaggtagcactctagaggctcatcgatgctcgcagaggggaattcgaatgatcccatttgtcctatcatcggtaggattgcggggaatgggtcgtccgggcctgggttgaaggatacatgaagaacttgggagtcattgatgattgaatgaattggacctaggtcatatgtggctagaatatagtgttaatagttgaatatagtgcagatctatagtgatctcgtacctcgatgcttgtaccggttggcggtgttggaaaccttcttcgggtaggtcaaggttcggcccatgatgtatggcagtttgtagaatgtgtgtagttaagagaagcaagaggtaagcggcgacgatataagcctttaagtgtttactacgtagatagatgatgaatatagataggtgatccgatgagctagggcacgccttcaaacaccctttttagcaggtccatccgcgcaaggtttccccacaaaggttagaccgagacattcttgatagcaggctgcgcacagatgcatcaaaccaagaatcatgtatacgacatgacatgggagtggacaagagaatggtctccgatgccaaacgcagccgaggtgattggcccacaccgccgactggaccgcgaacctggcgataacaacgactccaacagtttactcttatcacttatttttgggaccttgaagcatggcggcatgcaggtctctcgtgcgccagtgcgtcatcaatctgcgctcatctagacctttgagtcattcattgcgccaactgcctagatgcaaccctctgtctcgcagttatgctacctcggtggccgccgcggaactcagattcggccaaccgttgcatgagacgcatccccatatcctcagcgcaggcgaacgtttgtcattatctgtgtccttgagtcttgtttatttcgctgatcgtctgttgtgtagttactcccggaataaccgcccttgaatatgcacaacgtcgatcgaagctcgccaacaagctacccaaaggcgcgattgcggtgttggctgcctcggaagtcaagtaccgtgcccaagggatcttcaatgagtaccgccaggattctaatttcttttacctgacgggtaagtttgcttggcacgcccgtgatgccgcggaggacacccgctaaacagttccacgccggataggattcaacgaaccgaatgcattagcgatcatcggaaacgacggctctggcgataaccatattttccatttatacgtgcgggaaaaggatcccaaggcagaactctgggatggggcgcgctccggcacccaggctgctgtggatgtcttcaatgcggatgaggtgcgaagtgttggcttaaccaggtgaatcattgagctgacaccgagaacagacaggaaacattgaacgcattggagatattttgccgagtattgtccagggagcgacagaagtttactcggatatcccgacattcgatggttcaagatcatccttgaatcggtatctgtatggaccaacactcgcgtcggaaaagttgaagaaggtcgtcgaccaccgcagagtcaagcccctgaagaatctgctcaatgaaatgagggtgttcaagagtgaagatgaggttgtacagatgcggcgactgggacaagcgtcagggagagcattcaccgaggctatgcgacaggactttacccgagagaaagatctctattccttcctggagtaccagttcaaggtgaatggttgtgatacaaacgctttcgttcccgttgtcgcgggtggccaggtaaatctctcgacttttttttggtgaattggacactgacgaacctagaacgctttggctattcattacacacgaaatgacgatgtattgaagttcgtatgcctttccaaactattctgagactctgctcacgcttaattttagggatggtgatttggttctcgttgatggcggtggtgtaagttcttctaatctgaactcgatcttacagctctaggatactgaccaaattataggaatggggaggctatatttctgacattactcgaacatggcctgtcaatggcaagttctctgatccccagcgggatctgtacaatgctgtgctcaaagtgcaccggagctgtctcgctctgtgccgcgagacttccaaactttctttggacaaacttcatagcatcgccgagaatgggttgaaagatgagctcaagtccctgggctttgatatttccggcaatgtatgcatccgacctccttccgtgggtatgccgctgactccgactaggcactgaacgttctcttcccgcaccatttaggccactatgtcggcctggacgtccacgactgccccgggtattctagagggtacgacctgaaagcaggtcaatgtataacaattgaaccgttcgtccccagcctctttctccgcagacttgaaacaagctaatacatgccaggggtatctatgttcctaatgatgaacgatggcccgcccatttccgtgggatcggaattcgcatcgaggatagtgtttgtgtcggagacgaacacccgattgtcttaacccctgaggctgtcaaggaggtatgttttaactctagtaaccccccgcatgcactcgtgactaacttttaataggttgcggacattgaggcactgcgtaattagatctgatgtatacggtagccgttagatccctcaaattcccatgtacaatagcataaggcttcaaaagatcatatttgtgcccctttattttatcctatctaatttctaaactaaaccctacatgtctggactatccttgcctagattactttgtggtggctggtctgcggccaacccgaaggctggtccggggaggttggagtcgattcggcaatttttagcggctgtatgttaataagagaacattgcacaaaatatccccagagaatgagaccgagaatggaagtagagaagcaaagaaacccgaaaagaatcttggtcgcggtcaaagaatgcaatgttgatgttcatgcttcgcgctctgccgttggttgtcaggcctccgcccaaaacaaactaagctccacaccacacgacgtgctttgctcttctttctttcctcctccaggtcttccacctcgtctttctcttcccatccaacccttgaacacttcgatctatttctctttccttcggctgcttgttatcgtctcttggatacaatgtccattctctgatctcctctaaccttagacgtgtagcacgcgtgctcctgaccgagtacccctctttgatatttgactgttgtcactatacaacgtttagacgcgttctcgaccctgggaacttgtttcccaatggcaactgtcttcgtacctccctcgccacgaaactccatggccatggcgactcgtcgtccactcgcaaacgtgccgaatgcaaccaattctccacacagggcagggctgttaccagttaaacgagctcgctctactcaaacggagatcccgtacggacaaccaccgccgaagaaacaattgattgagagcatgcaatacgagtctcgttccgccacctgtcagaccacgaacacggactcgaaacttttcgcccgacgatcgaacaacagtaaccctagtgcgtttgaaaagaggctcgtcgcagccagggagaaggaacgccaaccgcaagtgaagcacatgagagtcgagaaggctccggcagataccatggactccattcgacaatggcagcggcactataggaaggcattcccacagtttgtgttttacttcgatagcattcccgaggatgtcagacggcggttctctcgccaggtcactgcacttggagctgtaagtcatattgcccacagaacattgagctctcccgtcttcagtgattacacacccccattggcatcttctctaacacactgcgatatagcgtgaggagaagtttttctcacgcctagtaacccacgttgtcacctcacgagctatccccccagaatcggccaccccagcagaaccggagtcaactgtagacgctagaaaccgcgatagcaacgttctaaccgtcaacccttctctcatagagagaaatggcgacaatcacctgcatgcttctttgaaaaccgagacccgacgtgaccaaggcaccatggacattctgcaaagggctcgacagatgggcatgaaaatctgggcgttggaaaagcttcaacgtatgatcactaccatcaatgacagtgacatcgccgcccaatatgaacaggctgctcggaataaggccgctggtggtaacgccgccaacgctgatctttcgcgggttcttcgtcaggaactgcttaatgggccgtccgatcgtgatccattggcatcacttgagatgataatgttcaaaggtccatttgtctacatccatgacatgaacgagaagaccaaaccagtcatggttcgagaatatccccgagtcgctagacgccaggatggatcttggccacagttccgaagtgcccccctcggaaaatgtcccttcatagatgagcccccaagcaggaaggaatatgaccgacaccgattgcgccaaattcacaaagagaagaaggctgcatctcacgcggctgatgggacacgtcatgctaagccaaaagcagctgcgccagttcaagctcccgaatctgtgaccacaacagagatggcacactcccagccatcggcaaagcaagaggaacgggttccgcctccaatccaaaatgaaacccaaaaaccattggatgaaacccatgagcgaaagagttctgaaagctttgttcctccccacttccctcgcaccgggcccttctatgctggttgtgagccagctgcctccggtattcagccgtcgaacatgacatccgcaattcgctcacaaatgatctcatctactgctgctgcacctggcgcgaaagctgggctcagcaaggaggttcatgggctcaaacgaaaggttcttgagaaaggtacaggtggattcacggcgggatcgatggctgctcctcaacgccgtggggatggattcaccacggttacgacgaagaacaacaccaacccccctggtaaacccaacgttgtcatcaatgaaaatgaggcaaagcaatctgaggtcgctggttccaagcgacaaagggaggacaaagatgagcaaaagaaatccgaacgccgcagagatcctaagcctggctattgcgagaactgcagggataagttcgatgattttgaagaggtaaaaaagattatctaggtttccttgttgcttaggtccttctcgatactgatcaatctcttagcacactttgactcgcaaacaccgtcggtttgccgcgaactccacgaactgggctgaactcgatgcattgctctccgaaatccagcgccccctcaaggacgaatatgaatatgacgaatagatttgccgtttctcacagcattccatgatttcctttcgacctcggcctcttctatccgatactttcgcaccctggtggagtatctttcttctaccacattgcatttttatttccgtcatgtccgatttgaacctcagaacctcgcataaacataccctcggcatcgacacatgcatggtggcgtttttttttccccctcttctttttgtttatcatgcatcagcagtaccagtaaccagttcctctccgacggtctgatctgcttggcttgacctcaatggaggtcgtccactcttttacagcatctttcttcacttctttcgattgtattgaatatccgattttaaaacagcatcaggtcgccttggaattcgtgaaccgacctatatcaaccgccgacggcaattttggatactttcatttctcatgttgctccaagaaaaactcaacgtcgacgctgcttgtctcatgtgcaaccagcttctgctttacggtctctaatggtggccggttgcgatataccgaaggtataatggacgatttagcatggaccaagggttcctaaccttgcattgcactccgttctaacacatcgttatcccctttttggtcccacggggccatattttctatctcgtcagcttttccttgcgtcttctcactggtggtaccttgttttctgatgggctgtggcttgaatacccagcgtaggcggccgagtctctgttgagatttttactttctcgtgacattacttacccgaataaccatttattcgactcgatgatctgtatgcagtttgtatcgtgctaattgaattgtctgctataaaatatattcttcagtagagaacaccagccagaagtagaaaagtagaaagtgtgcgaggcccctcacttagcccaatgcggtaatcacctcggcgtgacgtaaactgcgagcggtgacattagtgccaggcggtgagagtaaaaaaaatatcccctcgagctccagtcaatgtcaacataataaaagctttatattgaatattcagttgataaagagacaattatcatagtcacatattcctactagcgctagatcggcgtgaatgcaccgttcctgagcccatctaccttgcagccccgcaaaacgtctcggtactcggccccgtaatcggcggcagtaacgaagatcttcaacttcaggaatgaatttgtgatgctcccaactacgccgcataacccagcacgttccgggcagaaggatattgaaaatacaaaaccgaagctccggacatattcctcgatatatgacctctcgccctcttcatcgtttttgctcgcacacacgaaaagcttcagttcgccgctgaagtcataattcctttgatattgccacttctacagctcggacgggatacaacttgtgcatatatcattgcatattggtacatattgagatatatacttcttgggcaccgaaattctcgctattcgagatcgtgcgtcacgaggtgcagccgcgccactccgtttttgacaatcataccacaaacccaatggccgccccaggctctgtgctgcagcgcacagcgctaatctcttcatcgatgctaagaacgagagtgatatccgccaccaggacgcaagccacacacacccttcgcaccggccgctgctctgccctgtcctcccacataccgacgcaccccttcttccaaacccgacatagctcctactccgcgcccacactccgtgaaaatgaaaaggcgcgaaagaaggttactatccagacgctccagaacatgcacaaaaagggggagccaatcacaatgctcacggcacatgactttcccagtgctcatgtagccgatgcgtcggggatggatatggtgttggtaggggatagtttagggatggtagcgcttggactggaaaacacgacggaggttgttatggaagagatgattcttcattgtcggagcgtagcgcgggcaacgaaagccgcgttcattgtgagttgccgggattttttgactggctccacagtgccaccgactaacaatcataccccaattccaggtcggagatctaccaatggggtcgtatgaagtgtgcgcagagcaagccatcgagtcatcactgcgtctagtcaaggaaggtcgcgtacacgccgtcaagctcgaaggtagccaagaactcgcacccacaatcaagcgcatcacacaggccggtgttccggtggtaggtcatgttggtctcacaccgcagcgtcagaatgccctcggcggcttccgtgtgcagggcaagacggctgtcagtgcggtgaggatgctgcacgatgctctcgctatgcaagaggctggcgcgttcatgctggtgcttgaggcgataccgtcggaggttgcatcgatcatcacgcagaaactgcggatcccgactatcggtattggtgccgggaatggctgctccgggcaggttctggtgcaggttgacatgactgggaatttccagcccggtcggttcgtgccgaaatttgttaagcagtatgcggatgtttgggatgaggcttcccgtggcatttcgctctatcgcgatgaggttaagagtcgggcgttcccttcagaggaatacacgtatccaattgcgaaggatgagctcgccgagtttcagaaaacggtggacgaggtcttccgggaatcatgatgcgcctgattgccattttttccgtggccatttcttgcatattttgtctatattaatgcatcatcatcatcatttgtacatagcatcattgagcagttcgcgctggttgttcatagcctactcagccgaacgctggcgtcattgaataagcgacaatcaattgatcgtccgttttgaaacactattatgacattagcattcaaactcgaggaagtacggtagaaaatcgagttgacactcaccctccatagtccgcccatgccttcatccagcccaggcgcaaacacactattaacataacaaaagacagaatcggtctctttgcagtccagcttcttgcgcaggaatttgacaactgtctcgaatttctgcgaagcgctaaccttgaacacccgacttttcaaaatcggggctgatggaagaggctggaagcgaacagtaacttaatcactattagttgaattctaccatctgaggatatcgcggtgatctgatcaacccaaagcccggagaagaggggtcctacctttccccgaatcaatactctccacgtctgcaagagcctcgtgcgcatcacggggtaaattggtcagcatgaccgatgcagacatattcatcggtagatcagcgccatggtcgtcatctgggatcggggcgtttgctgagctgggagtgcctgagctctgggactgccgcaggcttgggcgatggctgagtgtggtttgtagatttggagtgggggagcgttgtggagaacgtgttggagaagatggattcatgatgtatgatgctacttagagaggtacgtagatgggaggagaaagatgtaagtaagttgggggttgacggaggcggggggccttaacgcgcttaaagtttgggctacgcttagatgtgtaaacaatcattttctgtagagcttcatagctctgaaagaagtttgccttcttttcttttcatagataattgcaaagggtttacttagatccaaccttctggggtcggaggtgtaaagttaacatcaggcagaattttatctgggaaaagctctctccacttctttccaccgtcctacatcgtcgggtcacgcaaaaatggaaccgggcagtcttcgatcattgataaaatgcagctgcaaggagtcgcagcctcagctgtagctttcttcttggctctcgctttagcattgtccaaccgaatgctcttgcgctctatagcgaggaaaaccaagaaggacaccccggctagggcaatactctagatccaaacggcctatatctcgccccataggaaatatcaactctttccctcttgactccagtactacatttgtacatgtggattgctatcgtatttcaaacaatgtacccaggctctgacatcacattgtaggctcatatcttccgtatagaccatcgccgtttctcccttttgataagcttcatccagctatataagtagctctctgtttattgctagagaatcatttctgcttctcttttctccctgtcctctgatcgtcccaaaatagtctacagggcaatttcgcagacgctaagaacttcatgtcaaaaactatgcgcataccaacaaaatgtttgataaactcgtcctgttgctcctgtcttactttttggcactgtctagtaagtttggcctcagtttggtctcttttatttcagtcgcgatggcgattcggatagagcaggggcctgagtccaccgtggcggagctcgtccgccttgctgaagagaagggcggtcgagtaatggccgacgtggccactaacctcatctcaatcgttatggtgtgtgctgtgaccctacaaggcatttgacttgtgtaccaggtgttatggagactagttgaccagtatatcccttggtcgctgttccccgtgaaggaacaacaaactgaatcctgatatagctagtttctagcaccaggtgctgggaggttttatattgctgcttttcccttgtccgacaagcccaagaagggattggtgccgagaaagtcaacgatatctcgaatctgcagaccgcaatctcgaatcttcaaaccccaagtatcattgtggatttcctagatgaatcaataaactataagtaggcaatggcatatcgtacaaactatgatcttgttttactcacatacaaatacgacattagaactaagagaatatgtaccaggtcaaggctttcccgagcctccccactggttagagcagcacttcccacaagtggcactattcacttctccggttcccaaggctcgttctccgcccaacggcctggggcgcatggttatgcgcggaatatatatctggggactaagtttgaacggcgatgacgcgggagggagaccgtatatgcagctctgaaagaaacgagataaccaccttcaatctgcaaaatcattcatatctatcaattctatggtttaatctagacctagataacaataaaacagctttatatttaatccctccctctttaacttgcctagatcgatagcacgttgacttgtcaaccaggagaatgatcatagattgaacctctttctgtgaggatgggactattgtcagttctggtgcgagagggaggtcaattacaagtcatctttgattctaggcttaccttactatatcattgagctatgtatgtctctctaaataaaggcagtgtcataatgtttgccagtttgttataatacagtcacagttcctttcatatgggtgtatatggcagcgacaaatcggagatcgtctgataaatgcgtatggtacgcttacggaggatagttttttaagcaaatcatatcttcgtttgatcttccattcaactactctcctccacttctttatcacacaacacaccatggcgcctgtctatcatggccagtggtcttttgacaaggacactttctgcgtgacttcctccggtggccatgttcacccacgtgcgacgtattccgagctggatgacattttctgtgcacctttaggcgacatcagggacagagctgaccatcaagatcactggtacgaagcacaacttctccattttggactaccaccgacaagaagcaaagctgcagccaagatgaggttgatggatgccttccaggatgaaactctagatgttccggagcaaattctccggatagaacaatcactgtcgaagaagtgggccaaacgagactcagaggctcgtgtaatgggtccttcgatgcgacccttatttcatcctatcatcgggagagcagcggcaactgacaataccgaatttggcaccacccagaaaccgtggggtaatcaggagggaaatgcatttggtacaggcttcgccggaggagccagtatgcaaggcaacatgcgaccccaacgaaaccagatacgaccccatgctcattcaaatggaaagaaacgtaaccacgaagagctcccgacccgccctatgaagaatgccagatctcgtggtgagactagtggacccaacttgcaggaccagatccaggtcaacccgaacggcgagaccttccatcagagaccgacagttattccagtctcagttggaaacggacagccactcccggctccaggcatggaattccaacaaattggatatcagacagtgcctctatcgcaccagactacatatgagacagtgagttgtctttccgtgtataagaaatacagtataaccatatctgaccacaaacgcaggacacacgactatcttcacccgggctaatggacatcgacggtccaagtgattagtctaggtacggctacaatccagccaatattctcaacctcaaggctggatggagttcagtagccaaggtatgagtggacttcgggatttggattggtgaaggcaaatttgagataagctaggggcatgagaatttgtgttaggtgctactagggggagaggaagattcgtgaaatgtttggagttcaattgattcaacggaatttgatagcttgccagtctccactttatgtatcaaccagtccaccactatgatgcctcatgtcaaaaatcagtggtactcgttgtccttcaacaagcttcgcctctccacataagtaatctcaaatcgaaatggtgcatcaacaagcccagttgacttctcccattgtggatccagataccacggcttgatcagcaagacctcgaagacggtgggttgtcgaatctgatgcagcgggataagccaatcgtccagacggtttgttacgtgaggatataaatggatagtcaatttcttcaggccaggcagcttggtagcgagaacctgacagcatttattccaacttagaccaccaggatccggaaagctgagctgcagagtgcgaatcatgcttaagcgctgtggtagaagtgtacgcgaaaaatcaataatcgtatctgtgtggttaaagaggaaagtgttcttttggaagatcatatcaataacctcggagtatctagcacgctgttagttggcttatttcaaacatagatggaagtactcacagtcttcgacaggtttgtaaaagaggaacaaaatccgctcttctcgtgtcaaatttccactcggagttctcgtggtaatatgatccgtagttcatgggtgtgatgcagtttcccccgggccgacgagcaagcaatccccaacaatgatgactacatggacagaaattgcgaggctcgctgcataaaatcccgacagtttctttacgggatcgtttccatttgtgctggtccggtcgaataatatgcagcatccggctacatagataatgttcccaaatgagaagtcggacttcagtgggtagacattcgaacagaggcgactgggcttgttggagagtagattgttgctcgcgtcgttttgaaagtgatagtcgccatccacgactagtcgacactttgaggtcttcattctccggaagtggtggggtgagtggcctggggcggggttttgtagataaactgaggtgatttgagtcgtcatcttgaactcggttcttctttgccaaccctagctttttgccatctgcctcgtcgcccaggtttggcgccatatttgaactcgtagagtgaaagttggatagtgttgcgtcgggcgatagcgacataagagctaaacacgctgacgtgtaacgtcagcgcgcgtctcagatgtggactctaaatttgaaggctaagagctaagatttctatgaaggggatagaaattgaattgaagtcaagatgataaatcaaacaacgaacgtcgcccaaatgtaaaacatatagtaccgggacggccttgtttgtctgcattaaactatgccaatgaactatatagcagagacagtcaccaaaatcagacgatacttgcactggatgatctttttcactttcgatcaagctcgggatttcacagcccaggtatatatagtggatttttacagggaacccccatatcgacccttctgcctgattatgcctgagacaaacatatactaacagtaacaaccacaaggaagagacggatagcaccaaaccagaaaaagttcgaaaccacccaacgaggaacgtcagaagcgttatatctaacaaaatccccgtctatccagacagacaggaaagcgaaagaaaaagacaagtaaaggggacatagtggtaaatagccaggaaggatccatcaaggtcgacaacccggccaaagcataacagagggaagagaatagcaaaccctgactccggtaaagaaacccccgtcgagcttgtccctgccggagaggttattgcggagcgaagcgaaggggctccaaaatcattagaatcaatacagtgaagatgtaatcggctaacgttggcagaataatccaaccggcaaaccaaataaaccaggtctaatttggctagacgataatttctattacgtgctaactatgtagtgttagcctagttacccaagcagtttctcaagcagttgcttaagtacttagaatcctagagcaaatagactctcttcctttagattaaactagcacgttacagtgattacagaactataaccaagtaagcaagcaaggatggagttgtggcgatgggggccgaatgaggggccgaatgaggggcggcgaccttgcaaggccaaagtaatatattgtctaaggaagccgatacaacgtacaaaccagcgacgcgaacctaggagcctgactggccaactatcgtcctcgagagtggatactccgatagtcgacgcacagtggtggctggtcaatgccggcggcgacgtgaagacaatcctccttatctcgataaatagggagaggcaggccctccacctcgaaagatggtgccttgctccaccccacaaccggcccacagcccgccacgccccgagtatggtcccgacgaaggtggacgaggtagatattatcgtgggtaatcccaggccatactcaagtactatacgtagtactgtactaatcattgccatcataggttggcacagccggaatgtctactggcatagcagtctaacctaattagtataggtcaatcttggcattttcaatacacggaccatttaatacggtttcgctactgtaaaatgcacagctttgaataccggaggatctattagtcctataatgtctattgtttattttaattcatgtaatcaggctctataaattgctaagtagctgagccagtactccattgattggacctatattttacagaaccggtttagccgacatgttttcgatgccttacagatcaggcctcattcggtataaattccccgcatccccactttcatcttcgcccttgataagctcagctcttcaacgtccatattgtgacttgaagaacatggctgaaaagagcattgtaccggccgctgaccttgaatcatttacggaatatttaggaggctgcaaacgcatcgttgctctgcttggagctggaatctcagcagcgtcaggcttacccaccttccgtggcgcaggcggactctggcgctcccacgatgcaacctccctcgcgactccagaagccttcgatgagactcccggtcttgtctggcatttctacagttatcggcgacacatggccttgcaagccgacccaaacaaagcacactacgccttagcggagctatcgcgaaggaatgaagacttcatcacattgagccaaaatgttgacggtatggatgtcggacaagtgcttctgtctgaattactaaaatcccctcgtgtcgtttttaggtctctctcagcgagcgaaccatccctcgaagcagctgcatcttcttcacggcactctgttcactgtcaaatgcaccaatttctattgcgattacaccgaagacaatttcactgaccccatagttcctgccctcgaaattccaaagaagagcccaggccttaatccctctgcgaccgacaagactggcgaggaagcatcgaaagcgctagcagaagcgctggacggcaccagcaacgaagtagacatatccgattccagcaatcctatcgccacagtgagcaaagaggagctacctcaatgtccgaaatgcaaggatggattgctccgaccgggagtcgtatggtttggggaacccttgccggagaagacgctcagcactgtcgacaagtggatcgcggccgggccaattgacctatgtttggtcattggcactagcgcaaggatctggccagctgcggggtatgtccatgaggctcgttcgcagggcgcccgagttgcagtgtgcaatatggaccgcaaggatacaccgggcgagcttcataacggtgactggttcttccagggagatgcaggcgttattatccctgagatactcaagagcgttattggcgagatctgaatctcatgggaggatggatacgggaatggcgaattttgatattggggtttgcatgaactggtgacgagacacatgatagttggatgacaaggagctttggatttcatacaaactgttatttctaggtaaatctacgaatcttacaaatgaataggccaattgcacagactccgagacaccactgccgtatacaaatgccgatcatgcctcgggtattcaaatttaaaaccctagaaatagcggaattatgagctgatctacaattgcaaccaattggcccgaatccaacttgtatttgatatgcggggttcgtaaggagtacatatatagatctacattaccctcaacatccaaggggtgacatttaaactcggacgcccccttgacaatacgtaccaccatcaattgtacctcaattgcgcgacagacacaatgaagtcgacaactacagtaccccagaaacgaaagaaggaagacagcgatgatgaggatgatattgtcaaagatggcagcctcacatccgctgctgacaatttcttcgaggcactgtgtatgtgatcgaagcttcacgcagtccattggaaaggctaaccttctttccagttgaggccggtatcacatactgcttcgtcaacctgttagtgactgtattagccactaattctatgtgttctgaccggtctgatagagggagcgaccatcccgcgatgttggaagcaatgatcaaggctaagcaaggtgagtaccggatatgttaccagtaaccagggcttatttatgatagaaaacaaacccaattttccgagaatcattacctgcccttctgagctagttgccctatcagctgcactgggatatgctcaagctacaggggttccggtagatgactacgcccatcatatcaattctttcgctaacttcttgcaagcaatgcgtaattgtgcatgtcgactgcggcactcttgctatgggacagtccatacataatgcctccgtcagcagagttcctgttttgtgctttgctggtttgagcccttttactcagaatggcgagttgttgggttccagaactgagttagcaagccaaacgaagaaggtttacatggagccagctgactgatactgaagtacaggttcatccattggctacaagacgtacctgatcaagcagcgattgttcgacaatactgcagatacacgggtgaaataaagaccggacgcaatatcaaacaaatggtctcgcgagctttgcagtttgctacatctgatcccaaaggtccggcatatctaatggctgcgagagaggtactcgaggaagtaagtattcgaagttatcgcaataagccaaaattgtctctaaccatatcttatgcagcgtgtgggaaatgaatctctagacggtgaaattctcagttcgatcaccccaagtgcattgccagagcaaggtagggtgataatttgagatttgagatttcatatcgctgacagcaatagaggtagaattgattgccaagtcgctgatgagcgcaaagcgaccgcttgtcattacaagttatcttggtcggaatctcaaagcgccagccctcttagccgaactttgtgataaacttccaattaccgtcgtggagatggtcggctctgacgtttgcctccgaagtgaccacgaagcatatcgcggcgttaccgtcactactcatccggaagttcttcaagctgatgttattcttattcttgattgtgatgtgccctggattcctactgctggaaagcctcggagtggtaagaatgtccaaaaaaccatgtttcagtgctgttctgacacacactgcaggggcaagggtattccatctagatgtcgatccgttgaagcaacagatgccacgtaagttcatatatcgaccgtattgctgacttttctctgcttttttattaacgattacataccagtcttttcaatcaaggccactcgcaagctcaaggttggctgtggaattgcgcttgggcaaatcaatgccttcttggataaacaggatatcgaccgggctaagtataccctggagtttgaggagcggtcaactaactacaaaacctggagggaaactttacaagcacttgaatcaccgtcgaaagatggtgtagtcagtgtgccatatctggcatcgagactgcgaaagtctctcccccaaaacactatttacgttttggaggctgtaaccaatgcaggacacctcatccaccatttgaacttgactaaggtatgtatttatgccaatgtgctgattctatgctaatcaaattccagccgggaagtctgattgccagcggcgcaggtggtctaggatggggaggtggtgcagcactgggcgtcaagctaggcaagcccggctcattcatatgtgcaatgtaagtgttcaccagcgcgggagctcttccacaatatctaataagcatcagcgtcggcgacggagtctatctattctcgcagatggaaagcgtatattggatcgccagacgctacaatatccccttcctcctcgttgtgcttaacaatggcggatggaacgcaccaaaggtgtccgcacttctggttcacaaggacgggttatcatcgaagtcgaatagacgaggtcagccagatctaaactaaatatcttgtgcatagtagctgatctagtacagatctcaatatctcgttcgacccttctcccgattaccccggtatcgctgctgcagcaggtaaggcgtggggtgcgacagttaccacgcgaagcgagcttgatcctgctatcaaacaggcaacagaagttgttcaaagtgggaaatgtgctgtggttgaggtttcgtgagtgggaatagtggctcttaagtaacaaccgcttactttcatctatagtgttccgtctatgtggaaagagaactagtacaaaatgccagaagggtaaatgggaaaaccagttctcattttctggcttcaagaagaatttgcttctttttgtggtgtgttatgttgaaactgcattgtctccaatgcaatgggaggtagttgttgctttgaaagtatgaaatatgtcagctactagacatagattgggtactagcttgtatgcgattgatctgattgatatctagatgtaatactattcttgtactattctccaagaactagatgtgccttttctttccctgtgctgcctgaggcacccagccgttgctaggccaacctcaaacaaagcgataaccttttggaatcgataacgacttcttctccctttgatgctcgcaaacccccaccatcgacaaaccacttcggattcaaggcatcatctaagggtgagtgtctccaaccctgttatattggttacattttcctggaactcgaaatttcagttcctaggggatcccacagtccacgagctggtcgagcccacaaataacataaagagactaactgcgaaatccagtgctcagatatccctcttcgcgtcttgatgccctaagattagatcattccagacttggttatcctgtgaagtcaacaaacaaacctatcaattgtctgacaagatctactcaaaccacaacgtcaaaacacgatggctagagaaagcactgcgccaatggagcccctcactccagggggaaaaccaaacacccagcctcacccggcacatatccaggaacccgaattcggaaaaccctcaccgatcggccccgcacagcacaggtcaaaccaccttttcaacatcccgaagccaaatcaatctcgtgccgaacatcatcgacccgtccctcgaccgcatccgcaacagcagccacaatcacaccagcaaggccattcgactgctacaccgttggtgaagcgaagcgagccctgggatccattcaagccggtcgcaccatcagcctacaataaccctcgcggagggttccaacatggcgcagtgagtatcaagcgacccgaaaatgttacttggacaactccccgggcccctaggcctgtatatcaatccaagcctgttccaccaaagatggcgggcgcgacgaagaatatacagaagtttatagatctcacacgcgacgacactgatcctgttccaagggcatcagcctatgcggcgccgggcttcggggctatggatatgaatggctacgtggatacggctatggcaaacgagaacatcaaagctttgctggagggtgcattcgaggatgaggaagacaaggctgagccgaaacctaagggcaagaagaagaagggtggaaagaagtccaagaagatgtcacagaagaagcaggatgatgaagtcgcggtggacgagaagaaggaacaagcgattgacgacctcgatgatcttgctgctcaacttcaaggggtcacagtgaacgacccgaaggataataatggcgccaagtctggaaaagattcatctaccaagcttgatgaagaagacaacgaggcggcagaggcggaagaagaagaagatgaagatgaggaggaggattccgacgatgaagatgccggagtcgtcgaaggcttaaaagtgactcttcttccccatcaaattgaaggtgtgagatggatgtgtgacaaggagactggccgaaagacgtccaaagggattttccccaaaggcggaatccttgcagatgatatgggtttgggcaaaacagtgcaagctattgctttactgctcaaaaaccgcaaatctgatcacgaaaacagcgatgacaacaccgagtccgcaggcaagacgaccaagtttcccccaaattgcattgcctccactttggtaattgcgccacttgcactcatcaagcaatgggaggcagaaatcaaggacaaagttgagccatcccacaagctgagtgtttgcatctatcacggtacaacacgcgcaaaggcttcaacgactttagacaaatacgatgttgtaatcacaacgtatggaactcttacctccgaattcaactcgtccgcatcagacgaggccaaaaaggcgggtattttcgcagttcattggtaccgtatcattcttgacgaagcgcatacaatcaagaaccgtaacgccaaagctacccagtcagcatacgcattggaggcccaataccgctggtgcttgacaggaacgccattgcaaaacaacctggatgagttgcagagtctcatcagattccttcgcgtgaagccctatgacgatttggccgcatggagagatcaaatcagccggcctttaaataatggccgtggaggtctcgctattcagcgactgcaggtctatctgaaggcctttatgaaacggcgcacaaaggatgtgcttagactgaatgacaatgtgaagcctggcgaagaagaaccagacggcaagccaaagaagtcctcaaatggattccacatcactaagcgtgaggtcattaaggtggctgccgaattcatgcctggtgagttaaacttctacaaacgtctcgaacagcgaacggagaacagtcttgagaaaatgatgggtggttccaaggtcgattacgctggagctttggttctgctgttgcgtcttcgccagtcctgtaatcacccagacttggtcaagggtgatttagccaaagacaaagatattcttttgcagaacggcagtacgaatagccagtcgaagtcggatgaccttgacagcatcgccgatcttttcggggcgatgagcgttgtggcaaagaaatgcgatgtttgccaaacggacctgagtcaggctgaaatcaaggctggtggcagtcgctgtggtgaatgtgaggccgacttgaatgccgatgtcataggcacagaaaagaagaagaaaaagaagtcgaagaagagccacaaaaagcctgacgttccggactcaccgtcagcccgcaaatccgatgcacaaattgctcgttctcgcaaaaatcgacgagtcattattgacagtgacgacgaagacgaagaagaaggcgattgggttatacctcgcgaccagcgcaagatgcctaacctcggaaaagcaggtggctcggacgatgaagacgctgaagggggtggtgaatggctcatttcggatgatgagaccgatgatgagaccgatgatgaggtcgaatcaccctccagaaggaagagccagcccataattctgagcggttccgatgatgagagtgattccgaagcggatgacatctacaacgatgaaggagaaaacggagagcttccatccactaagattcgtcatcttatgcggattctgcatcgcgaggcaccggacttcaagttcatcgttttctccgtcttcacatctatgcttgataagattgagcccttcttgaagagggctaatattggtttcgctcgctacgatggtggaatgacaaataaccaccgcgaggctagtctcgaaaagctccgaaacaacagaggcacccgggtcttgctctgcagtctacgtgctggtgcattaggcctcaatctgacagccgctagccgtgtcgttatcttggagcccttctggaatcccgtgagttacaattttaaatcatctattgcgcattgtgctaaccctgaagctagtttgtggaggagcaagctattgatcgtgtccatcgcctgaatcaaaccattgacgtaaagatctacaagatggtcatcaagggtaccgtggaggaacgcattgttgcgttgcaagaccgcaagcgcgaactggccaatgccaccatcgagggcaagaccggcgctggcaagctcaccgtgcgcgacatgatggcgctcttcggtcgtgatgcagaatcccgattcaccgataaccagagcaccctagacttcaaccagcctactcgactgctgaataccggtgatgagaatgagcctgcttcttcctccactcaggagtctgcacactctgttccgcgcggccggggaaacgaggtcaagcctaaccggccgcgaaatgaagactcggtttatggccgacggtggtaatcagcatggtacgaaattatgaaatgaaatttggagataacgtttgcgggagtcccggttggtgtcaggaatgtgttcgtatttctattaaatttatttcatttcttgtttgatgttatattttactggctgatctcgtacatatcttcaacccattgttgctatgctaaaacacacgtctccttgcccttcattccccattgtcggcctgaggttgctccaggctaaagagtggtggaaccttggtcgtttgatggctggcctcacgcctcccatgtatccggaaacaatgcccgcgagtcggattcccgcccaattttagacatggcgatttcacaatggcgctcggcattgtgctccgattggcatacctatgaatctggataataactgccgtcgctatagataggagcagttcaagcactattactacaagtgtgctgtatgccatctatttagtactgatggatgggctaactcaacttctttgatctattctgacttattatacttgatatggcagggcagaagctaattgagagtctagttgtcaaatccaagtcagttttaatgccgccatccaacacgcttatcacactctagctgagcagaccactcatctagaatgtgtggggtatcgagcagagatgattctcgatgggccggaacaggtacctccatgtcaggttctatggttctggtccggaatcgccgagtctggccttcgtgcgcttgaatgtcagtaattacctggagatctttgattgaattgcgctggcagagcacggagttgaccagcacgccaaacctctcaagatcaaagagcggactagggtcaatgcaaacgtacacactcctcgaatggtctggatatattcaagccaggactcgatcagactatttgccgaagcttttaccatggatatgagagtctggtccaaaggattgcgagcgattctcaaatggtagtttccggcgaaccggacaagggaaccgaggacatgctcccagggaggaagcttgtttctggtggatcatgccttgataggttgaaagcccacagaagaaagcatgggctggggaagaaaacccccgtaaccccggttgaagcatggcattctggagatctttcaatcttgtaactatatactcttccggtctcatttgattctcttcatatactctgtgtgcacccaaattctccttcatacacgatggttcatgctttaccgcgttaatacatcgctaacattctgtgagctgcttcctgccaaattcgctgcccaatttatagctaacgctggtggccttcctagttcgaaccattctcggctgctctctctgctgaggatcgaaggctgagatatgtcttcaccgtccgacattaaagataacggggattggacggtcatttacgatgaccagagtgacgatggccagaacggcaagaaagaagaaaagccttctcgaaggaggcagtctctcgcgcgaacgttatccataccgaagagcatgtgcatcatgtctgacaacaagactgaagtatcgacggtagccgagctgctatccccgaagttgaaattgcctcaactgggcaccgaatcggcggaaagagtctttcctgttcgttccgtcgtctcatttgattccacaccttcatccgccctgcagacaccttccctcgataagctcgaaacaccgatatctcctttttcggacacatggagtgcaggcttcagcaatgaacaagcgggctctcagcagaaaagtccacctgggaagagtacgaatgctgaggatggtgtctcaaagagatccgaccatcccactcaaccgcgtgctgagaatgaaattccatcggtactcaaaggacaaccttgctccagccataatcttgacattttggcacaattgaaaaccactgtgcaaaacggtggcgaaatccttgacatccacaaatcaacaaaggggatatgctactcgcatgaagatgaagagaacatcttcactcagtcattcggcgcactggttgtgataaaagagtccgacggtaactttgaagtgcatatagcaagtgaaaactccaaggaaatcatacagcattctcctgatcaactcttcgggcttcgaacattttgtgatatattgccatcatcgcaacacagcaactttcttgctcattctaaattcgttttgagcgacgactactcagtccaggactctggtcctgaggtcttcttcctttgtgtattgtcacctgacggatatattcagggtacttggtgtaccatgcatacgagcacagtatataaagactatatcatttgcgagcttcagcccgagcctcgagggacaaaggttcagcccgatttggagaaccccgaaattcaaacgacaaaagcggatagccagaccttggacatgacctctggagcatttcctgagaatatcaatcctccgggaaaagaccttgataccagaaatagcaaatttcccgacccatcggagcttctcaataccatccctcgaatcctccagcgatttgcaactgctcaaacgctagaagcgctcgttcaaaataccatcgccactctgcagaatatcattgaatttgacagaactaccatgtatcatttcgatattgaccgcaacggaattgtggtcgccgatgcagttgatggttcgtcggggttaacttcgtacgaaggcgtgcatttcccggaatcaaccttccccgaaggattgaagaaactatacacacgcaatactgtatgctgctcttgttctagaagccagggcagttcaaaacttgtgtatcgggcttccaccaacaaaaggcccctcgacatgtcaaacacctatatccatgcagcaccggcgcccttaacgccgcataccgagaatcccgtcagggcctgtttgtcaatccaaatcaatgtctttggtaagctttggggtctcatatcatgtcagtcctacgacagtggccaaatgctccatccgctcatccagaaagtgtgctggtttgtagccgaggcggtttcaagtaacattgagcgtctgtcctacaccttaccctttcaatttcgagagccggacatctctttggataaaacgcgcacatctcaggctataaagaccccacccggtgatcttctcagtctgttcggggcagattacgctgcagcgtcgatcatgggcgaggccaaaatcttggggaaaccaatcgactcgcaggaagttttggcattgttcgaatacatgaaagccaaagaaaatgacacggtgttttggtctgcagatatcgctgccgattttcgggatctcaattactcgcccggctttcatcatctttctggtttgctttacgttcctctttccattgatggtcgtgattttatcatcttttttcgggctgatttagagagccataaccttgcttctaattcaagccggcaacatgaatggtcgtcggcagagtttggaaaggcatctgtactgtctttgctctatcgcactttcaccgatatatggcaagagaaggaggttacactgcagaacaaccagttgatgaggcttttactggctaattcggcgcacgagttcagaacacctctaaatgcgatcatcaactacctggagattgttctcgatggttctctagatcaagaaacacgagatcatatttccagatctcactcggcttctaagtcgttggtatacatcatcaatgaccttctagatctcacgaatacggaaaacgggcaaaagttgataaaggacgaggtattagatctctccgagaccctcacggaagcaacagacatattctgggaagaagcaagacagaagcatgtcgatctacaagtagtccaacacgcagccctacctcccgtcctcggagatcaacggcgggtacgccaggtgatcacaaacttgatcagtaatgctatacagcacacatctaccggagcagtgacaatcgagtcttgtgttgttccggagccgctggagacagatcatatctgtgtcgaagtcgcaatacatgataccgggtctggcatgtcccaacagactgtcgaaacattgttctgcgagctggaacaagtatccaacaagggatatatgcagaatcccaactcatttgaacatacttcaagtggccgtgtattcgagacggaaagcgtgcttggcctgggcctcgcactggtcgcccgaatcgtgcgcaatatgaacggtcagctaagcttgaagtctgaagaaggcaagggaagttgcttcaagatcaggcttgtgtttcctcttccgggtgaagatagtattcaaaagcagaactcgtgtgctacgtcaaacggacatgtgcagggggatgaaagaaaagaagacacaaagaaagacatcacatcctcgaattgcgtaacaaaccagaacgaagggggtattccatgtgaatgtggtcaaagtccagaattcgaatcaggaaaatgcgtcgtgcacgccgaggtaggcttgaaaaccggggaatcgagaaagctctccctttgtggcgaacagctcgatcagagccaccagccacaggtaccggccgctttccttccaaaagaagatcctgggcaatcatcagaagcgtccaaatctcctgtcaaagaactcttctcgatctcaccacccacaaaatcccctaccgaccagccccaaccccctcaacccagcgtctctcccacgatggactggaacctccacgtcctcgtcgcggaagacgacccaatcaatagcaccatcatgcaaaagcgccttgagaaattcggccacacagtgcacatgacaagcaacggcaaagaatgcctatctgcctataaagctgatcccacccactttgacgcagtgctgatggatctacaagtatgtcaaccaagaattaaacaaattccaactcaatgcacatactgacactcaatttcttacggcagatgcccatcgtcgatggccttggtgcaacacagatgatacgcgaatacgagcaagagctggctaatggagacacgcctgcgcctcgcattcccatttttgctgtctcggcttccttgctcgaggagaatcggaagatgtacatggattcgggctttgatggatgggtcatgaagcccattgatttccacagggttgatcggttgcttgggggtgttaggcttcagtgggtacgtcaggaggttgtttaccggcctggtgtgtgggaggctggagggtggtttgaggcatagacattccagaatgaccataggagctgagatgggggttatttcgactcgaagaactctgagaagggggtgaagatatccaatacccaaatcggggcattgaaatcatatgcaaaaattctagtctttctccatggtatctatacaaacagaaaagtaaatgcaaaatgcaacaaaataaaaacaaatgtaggtaaactcgtcatatcaaaaattttccgctatatcggtgaagtcaggcactgtatctccacacttaaacgaagggctatatgccttgcttggcatatatccattcttccatgcggtccgataactccactgcgcggctgactctgtccgccaggtccagtagaaccatcccattgccgtttcgaaggaagacatctgtgcctcggcatatgtctgaaggaacttcttgtaggtatccgaatattccgatgggtcctcgttcgcattcgagcagctgcacgttccttcggccgctgttgggcaataagccgtcgtggaagtggtagagtaggtcccttcccatcgagtacctcggccgacgttgttcaaatactgcgcgcagtcggtgtctgcctgcgaccattcaccacaaatggttggaccccatctggttgtgtattagcatatgagattacaaagagacggcagctcaatttaccccgaagtagtcgtgttgatctccttgatcatagggtaccaactattacagataatgttgaccttggcggtgtggttcaacacgatctcacccgtgttgaaagtagtatattgatgggtgtcgaggtacatgttgtccgggtgggtttggaacatgctgtcccacttggcgagattcagaaacccatcatgcaggacaatagtggcagtgataccattcttccggacgagttccgctgcctcctgggtccaatttaggaccttctcggtgggcagggtgagcatcagtggctcgttcaccagaccgtagatcgttaccacattcttatatcggtcttgggcaaagaactgcgagagttggttgtgaatctcaagcgaccgcttacggttgagcgtaccgtctgtaccggccaaccagccgatgctgccctgccggccgctatggttccagccattttgactgccaggcagtccgtggaggtcgagtttgatccgtagtccatatttgcggcaccactcgattgcgcggagtagataacgccacgcaatcttagggacgtatgggtcgtcgtcgtaggtagtcacggcccaataggagtatgggatgcggacgtgatccagcccggcctccttgatctcttttatatctgactctgagatgaattcggcataatgctgctcaatcgtggccgctgcggagcttccaagctttttagtcaaggtgtactcgtcgataataccagcgctagatggccacttgctgaacaaagacgggacaatgaagggctcgatagacagccatccgcctaaattgactccgcggatcggctgtgtgccgtaagggaaggccttgttaagagcaggcacattgtcgttcgcctgggcagtgtcatcccaagtcgagttgatgcccataagggaaaggccacccacagtggcatttgtgaacgtaagattgaacccttcggtctggtaccacgtaaatggatccaagtaggtgcccttggcgtaactctgaagtaccgctgtcagcaaattccatcgaggtgatacactcgagacttactggtatgcttgcgcggctgataccgtccaaattagaggtagtcgaactgttcccggaggaggaactcgtttttgaatctgagcccttgttttttgacacaacaattgcaaccgggatgatgatggcaagcaagaggagcatcgccaggagacatccgaccaagatacgtttcttcctcgaccagttagaccaaaatttccaagccggtggccctcggttgtccgagctgccttcccagctgtcttcatctttccaatgatcttgcacagcaggtccaccaccgccacgacgacgaacccgagcatcagagccatggccttcttccaaataagcaccagacacaactcgtgcgccggccttatggcgtgagtggccctgcgcaacttcagcaccaagtgccgcaccagcagcagcgtccaaagcagctcgcttccgctgtcgtcgacgttcccgacgcaagtcatcttctccgcgagacttttcgatacggtccacatcctcgtgctcagcagcaagacgcgccatagcgtccacactcaggaggtgcgcagcactactcgaagactcagtgctgcgatgtttcttcgccgaggccgcagcagcagcagcatcaacttcccgccgacgctccctttctctttcgcgctcgcgccgtctccgccgacgcgcctcagcctcaaggtcgagatcaacatccctggcccgtctatctctagccggactcgcactcgcactctcgtctctgcggtaccgcctctcgcgatccggccgtttagcaggcgacatagcaggtgagcccttcaccctagaactccccctctcccgctccctatcccgtcttctcccctccccagactcctcataagcaagtccagcctcttcctccctccgtttgcgcctctgttccctgcgccgctcccgctcctcgtcataatcatcgcgttcattatgcgagttcgactcgtaccctgcttccccacggaagcggtattttgcggtgcgcgcgttgccaggactggacgttgcgccttcgtcggtgtcctcgtagcggccacggatgtactccctatctcggtctcggcgcaagcgctcttgctcacgtgtgcggtcgcgatcccgatcccgatcccggtcgcgtctgtcgggtcggtctcggtctcgggattggctgggcatgccagatgggggtgggggttttggtgtggtatgcgctgatcgggatggggaatgtggaattattgttcgtagtgattgttgattgggttgttgtgaggtaagaagaggaaggggaaggagaactgatcggaatgtattgagattgggttggacacgtgggcattgaggaactctagccaagtatcttggaactccatctatatggggtcggtataagtttgttttgctttttccccgcacggatatcccgccaagagattgtataacaaggtaaaatgtcgttatgtagggtttgctccctataaagcccttgatatattattttataaactctgtacagctcacgtcttcatggtgtatacctactttgtcattctaggttaggatgtgtaaatggttgcggagcaacgggtgataaacgcgtccttatatatgtacggagtacggatgctccttatgtacactctagatacaaagatgcgaaagaactcatttgtatattgaaatgcaagatataacattaaatacaccaatcccagtccacatagacatgctccagtccattctaaccaaaatacaaatgttcatatcaacgagtcagggtatggaaactccaaaacactataaggttaaagaagacatcattgcgaagaaaataaaacaaaagtgaacaacgccgaccgaaaagaggagtgataaggaagaaacaaaacgcgggtctgattgtttgtgactgccataagtatggatctgtacagctgtaggggaagatggagacgtggcgatgcatcatgatggtgatgatatataaagaaagggatgaaaggaatgaattctcgctgtgtccggggaatctaatagaacgaaagtgagatggtgcctcgagcactgcatctcttgctgtaaagatcaacgcagtgaaatgcatagtcgatgtgcagtgtgcaatcagacagggtcatcaaggccgtctccctctggccgctcccaatagagggggagccggaacgtgtcgaagtggtggcaacccagccaagaagttagagctagcattcattcgccgacctccttgggtgctaaactgggaagcattgatatccaagccgggatttcaaacgcaactgcgagtcgaaaccacgtaggttagcacattagcccatattgtgcgggtatagattgtcagcagtgacagcgccacccgcacgagcgccaattggttttcaccgaagtcgggcctgtcagctaatgatttgtctggctccttctttgcccaggacgcctggctcagtcggcttgggactgcggtcgcggccctttttccgactgaagaatgatagcatgccattggcttgcttgttcttgtcatcgccattatccatcccatcggcgggggtagagttatgagccagctcactccagctgccagcttcgtttaggaccatttggaccccaccacttttgctcatttgccgcgtggcaccccggtgtctattgttggggggtagaggtcgatggaaggacggggcaggcggcggttggaagggcggcggaggcggaggtgaaggcgacatgcggcttgagggagacggaggaccctgaccagttgcggggtcattggggtcgggtgtctcgctgagtatagtcatgttgtcactctgttgggcgcggtagtgcgagccatcggcttggatgggagatgtatttttagggtcaggctgtgagaattgacgggcatgcgcaattggatttgccgggcttgtggtattcccttgggttgttgtggcaattggaaagcactcctcgggatttctgggacacaccattagcacatggggggaaatgggtttgacgggaagagaaacgcacattacggcagcaatagcttccgcggcattgccttggtagctagtcagggtgtagtcaaacggttcaaacattgtttcaatgagacggtgaagctcttcatcacgaatttccttcgcagtggcatcttcccttagctcagcgcgcggcttttgtctacgcgctctggcctccaagggcgcttcttcaagaagtagctcctctagatcgtaagtcgcatcaaagttagttttttcgcttgatgggcggaatactggtgggatctgtttgcgctcaagggcttcaaagtcgatctcggcgaagaacatgtgcgaggtgtaggtctcgaacccgatagcaccgattcgttgagtccgatctttttgtatcaatgatcccaacgccctcaagcaagctactgatactgcgggattggtgacgtagtatttcggctgcgccttcttgatgttttcgcttaaggtttcttggcttcggccttcaaatggtcgctgcgctgaaggttagacaggaaagtagacggaaaacaaatctctcataccttgttgtagatgcactcgtaaaaagtaacacctaatgaccaccaatctacctcaaaggcataaccagttccttcatagacttccggggctaggtaggctagtgttcctgatttgcttgtaagaggtttccccggtcggtaatctgatgccacgttctatgaattggagttagccgaagctcacaccagtggtgattcgtgccgatagaacttacaaaatcagccaggtgaacatgtccatcggaatccaacagcacgttgtctggttttagatctcgatgaatgataccctgcgaatggatatacctcagagcacacccgagttccgccatccaaaaccgcactgcatcctctgtgaagcattttcgggagatatggaatcgaagatcaccaccgttcattaaatcaaccacaatatagcttgaatctggtcagcaaggagtgacgatagtcaattccagaatactcacatgtactccatgtcttggaaactgtatcgcaaattgcaaaggaacggatggttcaaatgctcgagcattctccgttcacgaattatatttcgtacgctttccgaacgaaccactgaagcgaatgtcagctacagctttcccaacccggcagctttgtagttccaacaaaccttcctctttgcgaatatattttagggcgaatgtaagacctgtatccttcctttcgacgattcgtacttttccaaatgcaccctttccaaccacacggaggagccggaaatgattgaggttgactagcagagaaggagccatcagcatattattcgaaataatggaagtccctaagacgtcctccccgagtcgaggccagtaaacctacctgcatcgttgcaggacataggtttcccctgagtatttcccatgttgcgaggatagagcgatagccagagtaatcaaagttgactagtatcttgctagcaacatcacacttgttccaaaagtcttccggtcgaatggcgatcgcgtcaacggatgaaggagacagattttcggtgaatatcgagcttatctcgcaatttccatgagaggtgactgaattccgaaggtagaatggccaagcgggggggggggggggggccaaaatattatcgagcttatctcgcaatttccatgagaggtgactgaattccgaaggtagaatggccaagcgggggggggggaggggggccaaatattccaagagtcggcgaagattatcaatgcaggtctagatgtaaaatcccgagatctagacaaaactggatgaaattagaaggccaccagaactcttcaggagaaataaagaagattcttcgattgcaggcctgcaggagatgtatatcaggaaacgtgagggcccgggagcttagtcgcgaagcacaccgatttcgggttcgataaaccacgaaaaaaaaaagttggaggaaccaagttagagaatcgaagagataaatatgacaactgacaccaataccaagaatctcctgtccacttgctcggggaagtgaagcagagatgaaagaaaggggatgaagcgggtgagcggtctggaagaagccggcagtaactgggggccaatcacgcgtgacgcgcaagaaaatcggggaaagggggataaatgaaagaaaagggcttttagttctgtaccgacggagtatgcttcttctggtctgggacgccgtgcgatctacaccgtgctactactctttaagactagttgtgttgtggaagatattgatattgatattgtcgttggtctgtctcttaagttggatctacctgtgctatgaacaatgagactcaaatattccatagatatcacgcactcgctcggcgcatcgagttctacggaatatggttaggtggagagtatatactactactatagcgctggcccagttcgaccggcccgcttagattgatgagcggaggcaatgtatgatatccacagaatgcacagactttttcaattcgccagtgacttgtcacttgtaatcctaggcgacgatcttggcgaaccaaatgcagcttgaaacagggagctttgggactttagggggaaaattggttctatgcgattggggggctatattgtacaatacgatgtagatcgctatttaggcatttagcatgatctacgccttaaaaccctctctcttcatgagatttatgagactctgtgccacttaatttgggcttatctctcgggttctctgtctcgttctctttggaattacaatttagaatcttcccccaagtaatcgtatagttcgatcgatcgaaccaaccaggagatagcctagaaaccatgctgcaatcgactgatcacagttcgccacacgtgtaaaatagcctgtttttcccgatttctcgtggctgccacgttatggaccgctttaggccgaaatgcatggttgtctcgggaactgtcataaagaagggctctggaatgcctgtggaatattcaacgttcgatttgatccctcacctgcaaggacttttgtcggctgcagttggatcaattctaggcgggtctttttgcattcgctccactatggcgctgatatgctgaacacgtacgaatgcgtttgtctcccactttgactccctcaattcgagtactattggttccaccaaacttgacatgtggacgcagtcagctagtgcagggtttttgatccctagtcaaatgaaagaccagcagctagcaaccttagagggcgcccacggtaagcttataaaatggaatgtggaatgggtgaaccttgtcaactgggcgtcgggtaaaaacatgcaaaagataatcaaggggcggtttcagcctgctatttgactttcaagaaacataaacctgggataaggctgcttgtgatcgatacagattatgtatcaaatcatttaatgacaattatggtcttcagttacgtggcctctgtgttggcatattctctttcattttcagcacagacacaagacaagatatatttcggataattatgtttgtagatccctctatattaccttataatcataattaatacgctctaagcgtgaacggagtatctctggggaagataatgatgtattctctatctagctagtgccataggcggccggggtcacctgaccctgacgacggtgacatatggtagttgattaatggcttcatacaaaatgatacccaaattgcagtttatagtacaagtgtacccaaatatatatccgtgcactactccgtaggatgcaggaacaggaatggggtcttcaactatatccaatttgaacttcagccaaatcaggagactggctaacatggcggccattaccaaacttttctcgatccttttcacttgtcctattacttattccgattcaactaatttctttccaatgtaatattatggagaactagtgcacacatctgaggttgttggggtggtagatcggtcacgggatagctccttcccaggtttggcttcctcgattcctcaatgtcgctgccatttctcgttagaccttgtcatttcttcattcatgcaattatccccaatcattcatcatggagagcttcgaaaagtctcggccattgctgcagcgcccagagagctctagcattgacgttctagatttctctttcagcaagcccgcctcacacaagccctcgtactcgcgaaatctgatcaagcaacctaccattccccctcctggaattgacaatgccctatcttcaaaggaaacgatggtagaggaggcagggcacaaccatcaacttaccaggccaaacacgtatgtagatgagccaggctgatatcacggatgaacaccactgtccacgatgaactaacatgtggtattgggttcagccctctcaatcctcacagcgtcgggaaagaaggacccttcaagccgccagtccctgcgagacaacctgtcttttctcaaccaagacgactatcaacatcagctgagtctaacaaagacagcggtaaccagcctacagctggggatatagggaacttgggtttcggacaagaacaggcggtgatagtctcccagctgaacgagcccaccgagaccgatacccctaaagaaaccatcagccctgcacgaagggtcgtcgagtcgagtcaagagcgtgttgttgacattgagaggacgagtgaagctaattctgccttacctaagtcgccccaggtgccacatccccacagagagaggcaggacattgagatccaatattctcatgtgcctctcaaacctgtacaaaataagtctcaggggtcaaagcgacgacgtgcccctgagaaggacgcatcgtcgaagcagcaggcaccgctcattggtagcaaaaatggtgttcagctgaatgaggatgatctattcgagcttctcatcacaagaatgagacagcgagaggaaagcgagcaggcagtcgcagttatccaacggcaagtcacaaatgagaacatggccttgaaggaagagaaccttaatctgcaggaccggctcaataaatgccaaggacagctcgccaaaacatcatccgagtcaagatctcagcgcgcacaaatagaaaagtggaaggcgaaacttggcacattcaaaggtgtcctcaacgaactcggtcgtgaatatggcgcagtcctggaacaagccaaagaattgaaatcagccactatctctcttgatagagagaaaagcgagatccaaaacagtctggacgatatcaggttaagagtttcgaacagcgcagagaccattcaacaccaatgcgagagactttcaatttccgaggggacggttgccagcttgagggaagcgttggaccattcagagaaaagaggcgatttagtcaagacccagctatccaacgagaagaagcgaatcgccactctagaagcttacatccaaaatgagtctcagagccaattgcgaaacttggtccttgtcagaaatgaccagcgcaagatggccgaaaaacttgactctgcctatgacctgttcaccacatcttgcttcaaatcccaggataatatcctgtcaaaactgagtccggtgcttgaacactgtctcgcttcggttcaggggttgaaagagcagtgctctgccgagactttgaatgtccaggagttcaccatcagcgttcaagagactacatctcggtaagttccgtagaagtgtaccaaagaacaacacattttaaactcactataactctagtttcaactcattggctggacaggttacaagtgacgtcgaccgaggcacggaaatgagcaagaatgtgttccaagccctccaagaagtcattcaagccattgaaggcaacctcggtccgtattcgtcaattttcaaacagcttgctaatagcgagagttgctatgggagtttgcaacaaaagcttcagatcattgagcctatgctcgacagtctgggtggttctatcaaggccgtggggttaacagaaacagaccttgtgcgcgggttagagaacttcggtcagaagctttctgaggctcaaattccagcagggaaccctgttctggagatggagatcgccaacaaattcgctgaaaatacccagttgcaactccaactgcaagaaatctcgattgaggttgagtctcttcgaaagcaacttgccaacaaatcatctgaaaatgaacatcttcagcatgctttgaccgagactgttgctagtgaacaagcatctaagaatcaaaatgctcggctggaaattgagaagacggccttggggagtgagcttcaattactcgaacagagaattcgggaagagttggatgccgcaagcatcgaattgcagggtcagatgaaagctaaatttgaagaacaagtccaaggccttgagacagaaaaggcgaagctagaaagagacttcaataacctccaggcacagcttgcaaatgttcaaagctctttggtaagcccaactgtgcctgacgagacgggttcactaacagtatgcagaccgaaaccgaaaagacagccgaggaggagcgactaaaaaaggcctccatggtaagcgatgcggatcatgatagtcatgtgctcaactgataggcgcagctcaacgaatcacagaaacgaatcgaggagctgaatgttgcttgttcaaaatatatcacagaagcaaaagccactgaggctgaatcaaacttattgaaaagctccgaagccggtctcctgacggaaaagaagagactccttgaacagcttgaacaagcaaaagtaaagaccaccgagcttgaagcgagccttgggctgaaaacagagtctgtagcgctgaagaagaaggcaatacaggatgtagaaaagagggccgaggtccttcagcaggagacggcccagaaatccgaagagcttgcagcaacaaaagaaagcctcgccatgctcgcatcacggtcatcggctttggaaaaggtcggggaagaagctgatgctgaaataatttcactcctccgccgggcccaggaggctgaaagttggcaagcgaccataagagaagggtttgcgaaggtgattgaggtacattcagacgagccttttgagcaaacatggcagaaaatagaagacatcatccagtcctcgcttgttccgtccatcactggcgatacgtcttgcaacaagcctcatgataccgggaatatggaggacagcaatcttcttacactcgagtcaagagaggggaaacatgccaatcgcttcgcggccaatgaatcaaataaggggcctttcaatactggtgaagacatgcagccagatggacctctagcaccaaaaagttttagcccctcgaaggctttgaaacagggtgattgtgctgaatctctaccgaaattccctgccggtcatggccatattgttccgttttcaagtctgcatgacagactttcacgggaaaatagcatgtcacttttcaatgacccagctgagctcgagatgctcttcatgtcgactccagatctcccggaagcgttggtgccgaaggatgcctccaagaaagctcccgaataccgatctgttccaggagatcatctgagactaagtcgagatctcaatgacctaaaccctgttctcgggacacaacctcccggcgccgatgacaacagaagcgaaagaccccagtcgactcttgaaaatatcgacagttcgtatgtggataaacatgccaaaaacgaacggcccaacaccaagcgtaaagtagtcaacttcgagggggcgcgttttatcacccaaacagaggttggcaaagctagacgaatgtcagatgcaaccgacaacagctctggaagagagtctgaaagtaaggaaataaagagaacgcagaaacggacttacagccgtcttcgccagtctgtggcacaggaggagacgggttcaattgaaacaactacagagatgcagcctgccaacaaagctttggtaggcaaatctcaacagagctcgacggataagactgagcactcttcgaacgcgaacccaaggccgtcgaagagagcacgaaacgcaaccgacggcccggagcgacgactgagtccgaagggtttggcttcaggtagcagcaggggaaacacagccggccaagctagcaatatgcgaggccgaggtaagcgccgcactcgaggtaagatacccaatgcctctctctaggatagctctagctaacgattagaaggagaccgttacagtcagcgcttcagtcaagacgccggctgagcacttcagcgtgagaccggagagaaataccatttctctattgttactctaaccaagttgagcaaattctccatattcactttatcaaatgcaaggtgtgtgcgacaagtccatatatatccagatactgggttagaaagatatgctgttgtcatggacggatggacgaaaagagccccgggcaaggcgcatgcttcggaaagcgatgaagtggaatgttgttggatatttattgtagttttattgaggtacccaaagctgtattgctcttaacgccaaacacatgctccaacaaaaggaggtttaccgcagaagatccgagaaaccggggaaatcacaatttcccgcttgtcttcggtaaaataatgtacacataggggtcgttcccctgacacccttatcgcatttccctagatacgcgcaaagcctgaaaaaccgttcgacggcgtatcgggataggaattgcaaagaaacgcaggctcgattggaggaggaaaagaagagatcgaaatcgaagtcgtcatcgcggtcgagaagcggatgtttctcaaggcgcagaacaatcggattgaaaagaaaagccgagcggaacccatatccagaatcgaatagcttatttattctttccacccttggtcgcctcaaggaaaagcacctgcttcttaacgacagggtcgtacttcatcatgctgagaggacgatggacacggggccggatcatcgtgcggtagtagcccgtcatggccatagaaatcagccggacggcaatggtacgggacttcgctgtgccgggaaaaagacgacgttagccatcagccgcaaaggaatccggcgggttctcgaatttcgctcccagcgcccgattcacatcccaattgcttatggaatggcgggtggatcatgcgattgaactctcgggcttctcattccacgtacctttcttggccatcttgggcggcgtctcggtatgcttgatcgagttgtctctctgaaacaatttcgaggtcggagttgatcgtttcccgtcggtcacgtggagcttgcttagtcattgctgtttgggccggcccgtcaagttagaggatcaacccgtagacatctcgttggcggattttgatgattattttaaagttgctaggcaccaacgtgtgaataattattctactatacatataatccggggcttgtaagactgattaaattacccatcttccaccgttttctgcaacatacattagatatctcgtctgggacctatggatggactagtcctgccacccccctgccaattcatcttggatttctaattgattttagtcagtataataacataggattacggattactctgtactatgtttggccacctgttaatattgatcttccccgttgaactcgccaactcaatacaagctttaaccgctgcctaggtgacattagtagtatagatttcctatatgtgggtttgagctgtctattcaagatttttcattatgtttgacctgtatttccaactcagaaagttctagctaagtttgcatgagtgtcgtttacatcacagcatcgccgatgtgacgatatcatgatatgcaatgaccttcagagctgaaaatcttccttcagttccaatttcccgatgataccaaaaatcgtggcctgatattatagctattgtggctgaaaaacattgtatttggctcttcagagttagtatgttttacattttacaggactgagagatcaactgcatagcgggtgatatgagcgaggtagtgattactagtcgctaattgatgatctttcaggaaccaaaggttgattaaacagcgcaccaaacccgaaaacatattatcaagatgatctatagccgctcgattccctttgtcctttttgccttgtttggcacaggactcacgcaatccgtgaatggcttcaactttaacaagccaaccggcggccctccaggaagctattttgctgctggctcgtctatccccgttactgctttgcagagcgctgctgcaacggctagtactgctgtacccgatggtacctatcctatcaatagagaaaatggagctcaggaagttaccatccatagcgactgggcgaacttcaatcaggtagatactctcactagccggctacttgcaggatcaaactgattgataatagggtgcggcatatgtctggatcgcggatatggatgtcgactgcgacggtattgactatatgtgcaaggtaggtgattattattgtctgtctgggatattattgctaaccctatggtgcaggaagacgcggacggcctgaaccaaaccaattttggtgctttggctgcctatgaagtgccgttctttgtgattcccgacaggttcggaacccagtacgcaaagcagcttcccggaaataacatcggtgcagtgatctggtatgactttccttctttggtggatatttcagcggcttcctgttctaactaaaagctagtgacggcaagatgttctacggagtttacggggactccaatggcgctaccccccaagttatcggcgaggcctcgtggttgatggcccggacttgcttccccaatgataacttgaacggaaacaacggccatggtgatgctgatgtgacctgtaagtctgaaaatatatatttcttttactttggcggctactaatccaacaagatatcatcttcactggcaacaactcggtactccctagcagtgctctcaatacaagctatgtcaccaacttcagcatactacgctctatgggcgacaggcttgtgacctctcttgcgcagaacctcgggctggtaaatggagggtcctcttcttctattgcaacgacgaccgctggctccagccctactggaggcttctgagtgagaagaaaattgtgctggtaagtaaccttcagctcatattcttacttcatggtcactaagtaattttataggtgcctcttgcaagaccgagcatggcagtcaagtggtctggaaaagtgggaaatgcacgaatgagtgattgcgacctggtagctatgggggatttgatctaaagggaaagataatataaatggcagagtagctgtatgtaccgtactcttgaccaccgcgattttgccgatcggggtatcttcgctctatggggtatgcttaataacgttcaaatactgctttaagtgtatactcgacgattactagtgaacgcagtatatcatagacaggagcaaggaaggcgatcagtatgaaatgtattgagtgaactggagaactgactcgggcaaaagagaacacattttacgtttactcctattgaaaatatataactgtgtgaacagactaaattgtatgatttgtattcgatgtcacttactcgttatataggctcgctctattacctttctaatcaacattgaactcatcggtccaccattggatcatggttgatctgacctacgctctcgtcttttgaagtccaacatttacctcaagatcttcacccttgtccaatactctagcggattccagtctttgccccaggtagagttcacgagtatttcaacccccacgtgctgctgtcgccggacggtgtcttcgttatgtcctcatccacggaatctgcgatcctgctgttcaggactgatgttgtcgagtgccttggattgagtatctcgatcggaagtaaatgcattgagggccttatgttagagcgagactgtttgctaatgcggcaacaatgaaatcgcatggttcagcatgtgtgagttaaggcgcgaggtcggtggatgaatctgtgttggcagtgcctttgattgggaattgaccaaggtcaggggcataggcatagagtctaagtcgttccagacctccaacatcaattgcctactgaatatgagtcattaacatcagcatagacgatgagatgtttatgcaaatttcattgcccatcgatccccgttataaggtcatgagtgacgtgataagaatagatgggggttaaccgtgtcacaagcctccaatgaagtcgccaagttcggccatcgtgccctgaccgttctatgtatagccgaatatggagtaaggggtaaaatgttgaggagaagtcctccaatcatgtgatagttgacgaaggcgtgcttgtttgttgttgcggtcacctggcaagtcacctgaagtcacctgaagtcacatgaagtcacctgaaagtcaaaatgcggggaatgttcggcccgagcagccaattgggcaataatgcctcaagctcctgtggcaatgacttcattgtctgcaatttctgcaaaggcgcgaaaatagaacatcctattaaagaatagaaacgtaaatgtttccaggggtcacttgatgcgtttgcgtgatattacctaaaacccggtttgcgtcggggaactactaacttgattcagctgtgccttacgttttatgatcgaatctgagtctagaagcccataattttacgtgatttcccaaggatcgccaagtaattgccgagaattttgatatcacgcttgcagcgtagttggagttggtccgaatggcgttataatgatctacccgtggacattcccccgcaaaatctatataagagagatgtttccccggacttgagccaacaattcaattcaattcgattccacgcaatctccatctgtcttaccaccttgggtcctttatcctactcccaactacaattttatgtgagtaatataggcatctccctatgtctgacagttactgatacaatcctcagtcaatgacccagagtcaatcctccttcaccatggctatccaactacagcgccaggaacagagcttgaaatgcgagcaatgcggactccctgccgtgagcttatccacaagcccaagctccaatgatgctggcagtcaggcatactacaaatgtgtcccatgcaatcgcttcttaggcccttgccctcgcaacacatcaggagctagtcagtatggtgacagcgattctgaatcatcaggctcggaggaccatgtacctcgcggtctccccatcatttctacgaagaagcaaaagtccaacccacacccggctccggagttcgatgaggactgggaggcgaattgcagtccaggcttcatggtctcgagattcaaggcgcaaggcagggaagtgcttctctggccttgaagaatgatgcattttggttttttttgggaatagcgagcattgtttcatttaccaagtgtttatactcggtcgttacctgctaaggtgacgataagattcgagtaaaagtttatatatatcactaataaggctatgcctttgagctcggaatacagaatgtttgggtacctgcctatcagcgagattcatgaagttgcaaaatgtttacttctgggaaaacaaaactataaatccttcaacttcttttaaaagccaagtctttacctcaataagcttattccttctagagattctgaatattgctataacctatgacagattttctgggttcaatagcttgccaatgatctgaagctacagtcgcctacagtatcaagggcatcatcttcgatatgcactcagtacctctggtcatcgtcagagccgaaaatccagaaagcttcattgagctctgtatcccagaccatatcagcgctctcaaaacgaatttatattcaaacctcttgattttaactctttgcctattcgttcaaacatatttgggctgttgtcttgagccgtcaagtttatactcaaaacttattcaacgcaatttcatcatgagtactttcactttgtctcccctccatgaatattcatttgatctgcgaccatgatctctttctctttgctagatagagagttatcctagtttcaagtttcacctactcacctctctctcacctcacctcacctagcatcctccactttgtcaactttaccacctgcctatccccatcttcttattagtctaatcattttttgatcgcccagatggaagacggtacaagcaacgatggcaatcatttgcccgaatcacaccctgatacgactacaacctcgagcactcctaccattcccacgccctgtggtataggaaaaatatcaatcgagaacatagctctgcccgaatcaatcatcatctacttgaaccaggattccagcaccagattatggggatgctggacaggctgggcgctccagcaaaactaccagtcatccaccgtgcagcaagtcgacttgaagctctagctgcggtgtgcaactcgaactttgcagctagaatactactgcaatcaaccaatggaccgatttcggatatagatgccgtagctctgtgggcacaaaccatgcctgagctaccgcagccatccgaatattgggatgtcgtgttagccttcctcttgtcgaaagaggattgcatggcgctgcgggacgcacttcgattcgcagcaggcttacaggcattcaatgaatcactccaggagctagaagatggactggaaaaaaggctcttcatgcagctggcggataaatggtccgcgatgatttcagaggaagacagcatagaagacacggaggatgatattgaagacgacgtggggtaattctcagttggcacaattccattagactatcgcatttctacaatttagtgacctctccacgcataatcggttcatgtgtaactgtaatcacagtgtcttcctcctcgcttccttgttcctctgccatcgttatctttctattactccttttctccatgatcataatccaagtgacattaaacaaatataaaacactgattatcgtggcctataaagaagatgactgttagttcataagacgtgacaatgctgagaaacaatcatacccaaataaatcccccactacgaaggtgtatagcggccaacagccggatgcctgattttaatggttttatagcctaattaggactagctcttaccaattttagaccggcaggaaattaaaatacctgaattactatgacagatctcctagtaccaaattgagaacagcttgaaagttgaaacatgaagctattcatacccccccccccccccccccccccccccccccccatctnnnnnnnnnnnnnnnnnnnnnnnnnnnnnnnnnnnnnnnnnnnnnnnnnnnnnnnnnnnnnnnnnnnnnnnnnnnnnggttaaaaattggaaaaagaaagtttgcataccccccccccccccccccaaaatactatttctcatcgatcctaggcgttaaggccctccaactatatgaatctcctgtatttaaagccattcatacccgccgtagtcccgcactttcccggagaaaagctaatagcgcaactgacaccaaggcccaaaacggttggaaagccaagcctggatttcaacacaaagtccccattcctaccgaccgtataaacttcaaactctccgtatcctctggctccggcgtggcgaatatttgaatgtagttttgagaattaaaataggtagaaggcatttgaattaccccatggtaacagtttcgtctcttcgatgtgtacttacaaaagatggtattgagcggtgtcaaaggcggtctaaaactggtaagagctagtcccaattaggcgataaaaccattaaaatcaggcatccgactgttggccactatacaccttcgtaccccacggaaaccaggtgcttttgacacaggccaagctaccaacggcaccaccagactagtaatctccccaagacaattgtaggaagcaaaagtaatcgctctgacctccaaatccccagcaagtccctccgcagtccaggcgatcagtactggaagtgtcccgtaagaccatcccactgatatataagcgaagaacttgagaccatcggggatatcccaaattgcaagtaccaggttcgcgaaaatgcatagaatcccagacaagattataggctcagagcgagatccacgaatgtcagagtagaagctcatcatcaatgcgccagctaccgccgcgccattcgtgacagtggataagttgttcacaagagcgacgggatatttatttggctgagagtcgagccagagaataaatggtgtggcttcgctgtatgtcatgttgcagaagatgactagaaggagcacgaaggcgtagaatcgccacgatgtgaagattcgtttgatgattgttttgttgagacctgtagatggcttgaatccttcttcctgtagtcttttgttggcgagggctttttcttctgcgcttaggaagcgggattttgtgcgctctggcatgtcgggaaagattaggaatccgctgtgatatgttagttggatattagagacttttagggacttttcaataattccaattgcttacatcaaagcaatagggattgtgataattgtgcagataatgaaaagccatctgatcatagtaagtattggaatgcttgacatgcggtgggaaactgacctccaaccctgtaaaccatgatgattgttgagatgtgtatatgcagcagcttgtagatatcctgcaaacatctggccgatgggatttgcaatccagaaaagtgcattccgacgtcccagttcttccttcttataccatctgtacgcgcaagtcagcatgctttgaatttccgatagtcgggattcaacacgaacgaattgactacatggaccaagcccacataacatgaagtagcgctcaacccgacgaaaaatcgcattaccactagctgctcgtaagtttgcacaaacgccgttccgagagtgaaaagaccccaaaagatctccgcagctgggaggtagtattgcgctctatgggaaatatcagctggaagttttgtatggccatttacttaggttgcttacgggtatttgatcaagaccatgttgctggggatttgaaacacaacatatccaacttcatctggatagcaagcagggttagcacaacaatcaaactgccgttaattcattggagacaatagaaaaagggcaatgttcttacatgcagcatttatataattcaatctattccccgacagatcgagatcctgtttcatgccagaaacatatgcattagctattgaatgtcagtcaatgattctcgaaacatgcatgtgaggtacacatactcaatgccgaaacgtctagatacttgacaaaaaatgacaaacaggcatatggaagaaccagccaatccaactttcgaacaagttgacgttctaccaatggcatactggcagggaaccatcttgtggcgctctctatacgtgagactaagcgcgccattgttccgaaaggatgtgaaatcttttcgaacttggagaatcaatacgaaaccccggtctttgtatattttaacgaatatcatcttttgcatagatctaatctcgcgtcttttgtgagatatgaggccatatggcatcatacccctgacacgaataattgtcgccaggtaccgatatgttgattgcgccatatatcactaaaacaacaccacgagtatttcaaagcagactcaacggactcatatttcaatatctgtactcaattcaacctgtcggatgttttggcaagagtaaatgacgcgatcccgttgtagacaacgtattcggacttcttccgctctagaggggtagcaatgcttatctcgcttggcgagaaggcattctgatacgatgggttgagtattcgtgctttcttatagagatgacagcagatgagggttgagcggggttgctctcagctggagagataaataatatcgacatatagcgatatctggactttgaaaattgtcagagacatttgatctaaccgcatatatctaaaataaaatcaagtcttgagcttgataattttgaaatgtcagctgaaacctcaccacccaagcggcggatatacctcaatggcttcgacatgttcacggtaggccatctttccttcggacagtggaagaacccttccgatcggtcagccaccaagcgacgcgacctctcctactggacgaatctcgcccagatactggagaaaggcgatttcaatgcgttgttccttgccgacacctatggtctatatgacacgtacaaggggactgcagagcccgctattcgaaatggagctcaatatcccatgggagacccttcgatagtaagctagctgtctgatttttttcgatccagttgggttgctcatgatgtatcagccaatctctgcaatggcctcggtcaccaagaatctagggtttgcgatcaccacctctacttcatatgaagctccatacgttgtggcaaagaggttctcgactttagatcatttgaccggtggtcgattcgggtggaatattgtgacctcgtggaaggaatctgctgcaaaggccgtgagtattcacattggaggatttttgcccaagactgacatctatagctgggattgccactggtagatcacgataagcggtatgaaattgccgacgagtacctgaccgcattgtacaagtaagcaacagtgaaccctggatagccatacgaattactgacctgcaatagactgtgggagggcagctgggccgacgatgctctccaagagaatgctcaaacaggcgtgtatgccgacccaagtcgaatcaaatacatccatcaccacggcgagcattttcaattcgacggccctcacatcttggatccatccccgcagcgcacccctttcctcttccaggcaggcacatccccagcgggcgtcgccttcggcgcgaaacacgccgaaggaatctttgtctccgccccttcaccgcacatcctcgctccacgaattaaagccatccgcgaagaagccgccaagctcggccgagatcctaaatcagtgaaagtattcgccatcctcacgccgattgtaggccgaaccgacgaagaggcacaggcaaagtaccgcgaagcactagagtacgccagcgaagaagcaggacttgcattcttctctggtggaagcggtatcgatcttagccggtttgatcaagacacgcctattacaccgtcagatgtgcatgttgacgcccgtgttcattccacgatcaatacactctcctaccagagtcccgacgtgcctgaatggacgccaaggaatatcgggaaacacatctcgattggtggggctgggcccgttcctgttggttctgcgagtaccgtcgcagactttttggaggaatgggtccgtgtggcggatttggatgggtttaatattgggtatgtgcagacgcccgggactttcgaggatgttgttgagctcctggtgccggaattgaggagaaggggggtatacgcgccgttgggtgagagtggtacaatgcgagagagggtatatgggcccgggcaaaggcgcttgcgtgatgaccatgtcgggaagaagtacggatatgaggtgtatgatggccattagtctagtcacagggtggaatgcaatttagattggtctaatttgaaatgatcccgcgaaagcagatagatacatggatatacgtagtcgaggatcagggattttataccggatttgatgaattcacactcatttccactacttcgtactcaaacaaagaatgtcggagatcaacatagaaagaaaacagccaatttaaccctaaaaaagaagaaatgactctcagctaagccctcaggaatgtgccaaggcaaaccggagagatttcttccctcgcgccagctgaaagactctcccaccaaggggctggaatccatatggccaggtgaagatctatataattggcctgattctattgaggcttgacgctaatgccattagaatcgggtattttggacaatttcactgccaagtggattcgcacatatcatttcacgatgcacgtttcctgagattgaaattgagggcatattgacttcaccttagcgctttatagatctcaccttgtgtcaaattaattaatacgagaccggaaccccccgattggagcgaaaccattgcatcttgaactaaatcagcagatggcatcagttcactcgcagggggaatctccacaactggacggacaacatcgaggcgtttcttggcggtcgtttcatctttcccgtactcctccggactcatcctcctcaatttaatctcccatttgctttgaggcatcgctttgattggtccgatctgcgacagaacggggtctccaatttgcttggcttcgtttaacgtccccccgctagtggttcggtcagctcaggcgatctccagccttatgtctccggttccaatgtggaaatctgaaacagccccgatgcagggtatgcgccaaatacttctcaacgccatttccaagggagctataagtactagacatctactcatgatgttccccattctatcttcaccatctttcagtcgttccttttcctgacacttgctgggttcaagttgtctatcccttcatttctacacacacattcttttactacactcctttcaacttcaaccgattttaccaaaatgatgaactctacccaaacttccggctggcaggtcctagtgaccaagagaaagctcctggtatcctgcgttctgggcctcttcttccttgccatcgggatggacctccgagcagagctcggagctggacacaatcagaagaagatcctcaagcgtgacaccaccagcactagcgatgccaccatctggcagcctgcggcaggagtcaagtggcaaattcaacttgtcgacgccgtcgaagacaccagcgtcgatgccgacatctgggacatcgacctcttcgacaacaccgccgagacaatcaccactctccagggcaaaggccacaaggtcatctgctacttctctgctggcacgtatgaagactggcgttcagacattagcaagttcgacagcgcggacttcggcagcaacctcgatgactggccaggcgagcgctggctcaatatcaagtcgaccagtgttcgtgcgatcatgagctcgcggctggacatggcgcaacagaagggctgcgatggcgttgacccggacaatattgatgcatatgggaatgagaacggtctcgggttgacagaggctgactcgattgactttttgactttcctggcctcggaggcgcactcccgtggcatgtctatcgggttgaagaatggcggtgacattattggctctgttattgataagatgcagtggtcggtcaatgagcagtgtgccgagtacaacgagtgtgacgtctatgctgccttcacggatgtcaataagcctgttttccatattgaatattccgacgagactattgagtcggatagctctgacgatacttctgacactgccaccacgacttccactgatggcaaggctaccgccactgcaactgccactgttgctgtcatcccttcttctacctcagctaccgccgccgctgcaacagccactagtgtctctgtcatccctgcttctacctcagctaccgctgcttctgcaaccgccactagtctttctgtcatccctgcttctacctcagccgccgctgccgctgcaaccagcacggccgctgatgacaccaacgatgatgatgaagatgacgaagacgacgacgaagaggctagcaccgataatactaaggagaaaaaacaccgacacggtcacggacacggtaaccacaatctccgagctagagccgttctctcctccactttgaaaacatcagcttgcaacgcagccaacgccggcaagttctccactgttatcaagaacatgaacctcgatgcctgggttgaatattgctagactatcgattcctcgggggattgcttcgtatggcaagaaatcaatatgttagctggagatagtcgtgaataaatgactgtcgctattgtatacacttcaaagagacatcttagaatatatacaagacaagtgctacaattgagaaagaactcttgtctttattattggtctggtttgatgcgtagaagggctcagtactcagtatattgatgatgatggcgttgttctgtaggaggaatctcggtccggtggactaggctatatctaccatgaggggtcgcatacatagatatcagtcaattatcttcctcagaggacatcgcactttaacactaggttactcaactaagtaaaccctcaatattgcctgatactctggactgctttccacgcatcgccgctcaacatgacactacatgacgagagctctcaggaaccagagcagcttcctcgggagaactgggccatcacgccgagtggagaagggaactgttagatgtactaaggtctgttctgcgctgcgagtgcgagtgcgatgctgggcgccaggaataccggaatacctggatgctatcaatgtcgatgtacctatgtctcattctcaaactccactatactgacaaaagcttaggactacgagccgctaccaaacgtaaacccagcagtctccaggttgcttcatgcctcagttgaaatcgtccctttgatcttattgtcaataactgtcagagattctgcactgagattctgcagcgtcttgtgaacaatgggatggatagtaaccattctccagtacatgatccctccttacacaaacaaattctcagaaaccataaacttctcgtccctagcattggtttcctccggaatcacattagcatcctgaacctcgcaccccttcagcacagatccacgaccaatctgagctcggcgaccaatcacacacctggttaattgagccctagcctcaacaacgacgccctccatcaaaacgcaccgaatgatgcgggcagcactagcaatctggcagttcgcaccgatcacgctctctttaataacagcacccgatgcaacaattacattctcaccgagcagacaatccttctttgtaacgttgctgggcgaagccacgccttcggggtaggcaactttatgggcgtgtgctagaggcgacgccgccttgcgaccaacttcctcgatagaaggcagttttgcgaggaaaagggatgttgaaagcaagacgcctatgttatcgacccgtcgaatgaacggagttgatcctcggtggacgtaggctagaatttgcggcagttcgatggactggtgtaattgctctggctggagttcgcagctagaacgggtcctggtagtgctcatatccttgatgtcgattactttgtcaacgaatgcgccagtatagctgctttcgggcgtaaattctgtctcctgggtgaaagtggtgtcttcgttgaagttcttggtcaaccctagtttggcgccgagacctttctgccatgttgacttggcccaggcgccgaccagatcctccctaacggatttcagtttgctttggtggtggactaggtctttgacccaataggggaagacgtagacatgggcatcgcggaaggtggtgagtattctgatgcgcggacaattttggacaagggaatggcgaaggagaaggccttggtcttctttcattttctccttgattgtatccattggcattgacatgagaagtttggatagactgaaccgtgggattaacggtccatcggggccgtggacaacaggttcttcattctgctggagtggtgcaatagctatgaaatctgttccttctgcctgaatactctcctctcggtggtctgtttgatagtacacagccagaccaccggggcgagcttcccgctggcgatcgaagtaggaattggttggaggggatgcatgttgagtccgtcttgaatcactaccatcgttgagggcatacggactggaaatccacgcctcgaggattgactcaccggggatttcacagatgaggtcacaaggaaggagaagaaaattcgtggtgatacatctctggacttctgggagacgaaggagctcggcagttcccattgtcatctcgaggtccttcggtgcgatgagcgagaccgagggcgagtagaacgatgtaagatatgggttctggtccaaagcagcccgaaggggagggacagacagtggaggggtgatcaacgtgatatctgggatataattagccaatttgattaagagattgagatgggtctagaataaagagagcattcgggcttaccagtgacacctgatcgcctgcaaaaatcgatggcatagaataacataggtctgtttgcgacttgaatgaggcactttggatactcctcaggtctggaggtgaatgtattgagtgaacctccaggaccacataggatgagggcctggaagtccatgggaccagcgtgtggcatggttgtctgagtgaagggttaagcaagtgaggttaagaggtctttaaaatgtaattttccttgggatgagcgatcaatcgcgtgacatgtgtaagacggagagattgttgagaagtttggtagagggaagacggttcacaggaagagctgatgggggcagcctttaagagacaacaagtcacgtagttgcaattgaccggtcacgggtgaaaaagtctgaagttgtttgtttcataagtagccaaacctctgctccatcgaaatagataggtacatgacgaccgcctttcgggtggtcggtcatatcgatattgagttgtcaggcgggattaagtgaacggcaagactcattttgagtacgaccaagcattgatcttagacgatatagcttcggtgcctttttggtgcctttttagtgggtttgtaatagtttaacactctatattcaaggcttttatatgtccacaaccttcactcgcacaatgttttgccaagttctattttgctggtacccagagctatagtttgatattactaagatataaaactatttcccagttgatacgatttcctagagtgttgcagttttcaatcaaaatacaatatgggccgagtttatgctttgccccaaactttacagaatcagtacctgaaattaatgagctgatttggaaagaaaaataggaaaaggcaagaaaacagactaagcttttttatcaagatactggctctatatgcgttggttgagtaaaagacataaactgacgtatatagatcctcttcatataaatctcaagtgccatacccagaacaaggattgtctccccaaccatcatgcatcttcttcaatctcagcggctaattcgttctttcgatccttccgccagacaagccaccacgaagccagaatgcccgagatagccgcacacaggaagcaaagacagataacatatgacactcgatacgtcggtccaaacaccgtactgtatatatgaggcccagcgatgccactgaactgggccatggcattcgtcagcccaatacccatacccacggccactgtaccctcaagcgcacgaatacgttctggccagatgacagggtatgcagatcccgcacaagcggtagctacaatcaaagcgaggtatttgacgactgagttcttgactgtaatcaggatgatatagcagatgattgtcgtgctttcgactgatttgttgtcagtaggaactccatgtgtaatgcgggaattaatacttactcgcaacagcggtggtccagggtctgatccatcctttgtgtagtaaatacccgagaatattcaagaagaaaaagcatgcgacatatggaggctattgagtatgagtccggttagcgatgccttgcgtattggtgtgtttccctagattgattccaactcacaatattcatcagctgtgatagagcggttgtggtaaagccaagctcatagataacagtaggtagagcgtaattcactccaaatccgccaatgccatgtccaatccagtagattgtgaatgtgtacagggtcggacttgagagaagtgttttgaagtccccccagttccagcttttatcatttcctgagggtgctgtagaggatagacggcccttgaggaacgttctctcttcttcggtcaacattcgggcggtctcggggtagtccggaagaccgaataaagctaccacagatagcacgattgccggaaggccttcgatgacaaacagccatcgccagcctgaaagaccaccggccccatccataaagctgatggcatatgctagcagcccactcaatgcgccagatatttgaccgagagagtagaaaagggctatcctccagcgcagctcagatggcttgtaccagaatgccatgtggtagagcacagaaggatagaaaccggcttcagccagtccaattgcaaatcgtacacacatcatccccggaaagtcctttgcagcaccagcagcgcaggcgcagataccccagcccaaaatcaacacgaacatccatctcgaaggcgtggcgcgtttgagaagaatggtgttggtgggctcgaaaaagaggtagctgtaggagaagatggactgtgtccaggaccattgtgcggcgctgaaattgagctctttcttgattccagtgccggcttctaggttgatgattgcggcgttggagtagttgttggaatcaatgacacggaagatatatacaagcgagtaaaacccaacgagccagaaatctatttttcgtatcactctcttctcgagtttggcgttatattcattgtcttcgcgattgatctcattgggcggagttgaaggtatgctggaagtaatgacttccagctcgtcgcggtttcccgaagccccatttnnnnnnnnnnnnnnnnnnnnnnnnnnnnnnnnnnnnnnnnnnnnnnnnnnnnnnnnnnnnnnnnnnnnnnnnnnnnnnnnnnnnnnnnnnnnnnnnnnnnnnnnnnnnnnnnnnnnnnnnnnnnnnnnnnnnnnnnnnnnnnnnnnnnnnnnnnnnnnnnnnnnnnnnnnnnnnnnnnnnnngggtgtggaagttatgctgaaattaatccctcccagctcgtcgcgcttctccgaagccatattgtcaatttcaagatccgcttgatataggatgattgcttagaataatttcatctcattctgcagtcaaaacgcaacttattttccttgaagcacctttatgcttatgtgttacttggacccctccgttctcggcgacgcgggttattagggcaaggtgccatgatagtttggatcacgacatttcccctcccaatgtgaatattcgtttgattgaacctccattactcattattcattcggattgcggcatgcatagtctaaatgctataattgtggggtatggatattctcataacccccataagcttgacgcccatcatatataaatggacctcaaaataagagactaccttgaggtaccctatggtatggccttaataacttgctctgtactatttgatttttattgaagcagtcggtttcaatgtgtaactatgaaaatctaaggctcgcttaaggttttgcagagtatgtacaaaagcactcttactgacaaatcagacaggttaactagaccactgtgctgaccggaggcgacaaaaatgctcaggcgttgaagacctactctgcgattgtccaatcactggggtttttattatctcggggccttttggtggcttgtctaagctccatgctgagtggaggtggtctaaccggaactgtagcttagctatgccatttcttggtatctccgcactgtagccactcttacccactcatatacgtggggtccgaagacgtcttctgtccgcagccgttctggcagccttcgattgcaccaggccattcgtgatatccgccccgcttattcctgtcatcatcttgctcgtttggtcgtttaacgtggggattctattttatcaggagcagtgtcgtcgtgcagccaaaatttgttctttcaaagatgtagaaggattctagcgatgcctggctccgtttaatagtaggaaagtccatttggattggggcggtcgtcggatttgcaaatccctaggagttcggaggtgaaccgagcctcgtagagatatgtttcaggtcaacctgaccctttcctcggattctttcatttccagacgctgtctcatccagtttctcgtgctagctccttccgtgttctgatattcagtatgaggctacgcatgacagccggattttgccttgaagaaactagtagtttcctcgggtatgagtttaatgatttttgtatgaactcatggatatctgacaaggctgctaatgagaaataataaagctgccctcagatattttcttatactaccaaaggataggttgaagagaaaagcagagcactgaaggtagcccgattaggtcaattgtcgtggcgatcacaaaaccctcgtaatggaggattgcacaaacattgacaaatttggtctatcagacatgtctacgcacattcaaatgtgatacacaatccacggtctcaaattctattctattgagtcagagtttgattgactagttaactatgattcgaccccgtttcacggcacgataataccgttgcatataacgccatcctgagcgagcatgataccataaaccccgcatctttggaatagcaaagtgtatggcatagagcactataagagtacattatagataggttttattttgaattaggtatacaagtatactcttctcgcttaggatatcatccttcatccctatcctaaaacaaatatggctccctcagctatagaacaacaaatcccaaccgaaaaggccatcatcaaaccatggagccgacctgcacctactaatgagaaacttgattgggcaccactagttgagatcgacctttctcgtttcgacgaacccggcggcaaagaagagctcgcaaagcaattgtacgatgctgtgacacgagtcgggttttgggtagttgtcggacacggactcgacgacgagcgcatcctccgccagttcagtatcgggaatgaatttttcaaagagaatcttgaagaaaagcgaagcttcgaatgcaatttcgccgaaggcgagtatttcggctaccgtgaaaactcaaggtggattggagaaacgggcgtgaaagacaacatagaaatggtacgaatttacttcactatatcgtggattgaatttgactaacatgtccagctcaatattcccaaagctattccagaatgggatgatgttcccaaacacaggatcgtccgtcaaaactacgacgagattgccagcttccatcgagatcttttcgacaaggttgtccgcaagctgtttgtcttgatggcgattatcctggaattgccggaagaccacctagttcaggctcacgcctatgataagcgttccgatgaccacctgcgatacatgatctacaacacgcgcactcaagaggaatgggacaaggcacagggatataccaagggcggtcacacggactttggcagcttgacgctgctcttctcgcagcatgttgcgggtttgcagatccggacatcggatggggaatggaaatacgtgaagcctgtggaaggggggattacatgcaatattgctgacacgttatcgttccttaccaatggcaagtgctcctatcagttggtgcgaaaaatatctcgctaacatagggtgacaggtttcctcaaatcgacaattcatcgtgtcgttacacctcccagagatcagatcgatatcccccgccttgggttgctctacttctgtagaccgggtgatgacaccgtgatgagaaccgtgccctcgcctttgcttgaacgtcttggtcttctaaccgaagaagacaaaagccaaagcaagcctgctcctaccgggactgagtatgttcgagctcgggtgcgggatgttcatcataaaacggtgattgatcgtcgggaaaacacttcgtttgagttcaaaggactgaaagtgcccaactattataagtgatagattggtggtgatgagaggactgagtttaccaaattctatttccatgcctatttctgatagtgatgaggtggtgatagtatcaggagtcgagaaaaaaccagaagatgtagctggtgactctggtatatattacctcgtcgacaaggcatcatattatcgatatcatctgcgacaggtcatattcacgtggcatagacactttgtacagatgatatgagcaaaggataagatttctgtctagcctcaggcacatgacccaagcacatcagccacaaccccgcagtgagtcatgtatagaactgtaagagcctcagacaactcggtaattaaagtatgtcagagtgtggatatcatgatcttcgcagcctggtcaacgtggggtacctcactgaactgtccaactatgcttaatgaaataatacgatgtctcagtacatagtcatgcattctatattgatttcctggggactaagtaattgtttcagtgatatattcatattcaattcaattatctacctaatcccaagagtgggagctatctaagagtgtaaggctcacagccttgtcccgaaaagggcgcattccaacgcagcatatcaacgacaaaggaaaattgacaaaagaccaaatcgatcgagacaagcttctccacatcaaaatgagtcacagaaacagcagccaataaaggcagtaaaacgaaaaaaatacatgcatgaacatcgtcgactttccgcatccgtgattggccaatgtctccacacctgcacctccttccgggatgactgcagcaatgcgacttggccaagcctgcagataattgcacacaatcaaaacaattgatcgagtcacaatcaagtcggggtccgagactgggaggtcccgcaaatctgggaccccgacatgcactcgagtcaaagatcaaagctggaaaacagaaagtgaatttccgagggctcatccggcaggccctatcaatccagactatcaaagactagggtatggggggttggggttggggttggggtaggggtatgcctgtaatgtgctaattccacatcaccggtcaagaccgtctcgcggtcagatgggtgtgggcaatcaatgcccatcgcgagtgaattggggtttcttcaaagcgattgggttgggggttgtgtataatcgtaatcagaaaacagagtcggaataccttgccaggtacagacaggtatacgttcaacggtgcttgggggagccgtcaacgtaccaccgaggagtctcgtagtggcgctccacacgctcttgtcggtcagcgccgtacaatgacccacggctagaggatgggcggctgggagatccgccgggcgagcggtacatgatggaagtaggggaacgagaaaggcgaggggccctctcgacgagctggtaagtctcgggggacatggaacgaggacgagtctgcttgctgctgaccttgcgagctgtgacggtgtaggtccggtcatagctcgtggactgggtggtttcgactggttcctgaacgacaatgggcttctcgcggatacgcaagccttgctcgagggctgtgagaagctcgcgggcagcgaaggcatctgcgggcagcctcacccggattgacttgccactctcaaagtcaacagtagagaagtgctttccgctttggctgaagatgtagttgcgaagagtgcgggcgcgagtgttgcctgactcgcagagtgcgccaccatccttgtatgtctggacggcgtgagcgcagttgcggcaccggctggcgtggttctcaaagtcctggaccaccagcctctcatcggcatggagctcacgcacaagcgccagaggatctgttatctcgattggggcaggcattgtattggtgcggcgtagtccaagtaggcgtcgtttcagactaggacggggaggagatttctccgtagaagtcaaatgagtcgagcggtcaacggtatacgaggtcgagcggaagggcgacacggtgactgatttataagggtcacgcgaaagcggtaggtgatcaccgtatagagatgatcagatgtgaaattcaaggcaatgaattggaaagtgaagttcgaatgtatgtcaatgtatgccaatgtatgaatgtgtgtatactgaggaagatattctagagtaaaaggcagggggccctggtcattatatactgagtgagtatcatgcagagtctatagatggcgtcctggcgcctggagggtctggtgtctgctggtggggcctgagatctgcgatacctccgtggtacttggcccattcacgctaaacagacgggaaatgcaagtattattcttgtaatacgtctgctctgtattttccgtactggctgaggctgtgctttatgtttgtcatttgcttgattggccctgatcctcccaattcacagttaacttcaccacaacctacactatttccctttcagtccccgacactatttctaaggcttgatttagttgtatagcctgatccccatgacatcaactatcgggagagttttattacgcaagtcattcaccgaaaatcgtgtggctcatgtttctcgttttcctgcgtaatgacaagggtctcgtgccccctgttcccctcccccctgagaacaggcctcgagttcgcgtcatttgctaccctttgaacgtccaaggttgacactccgaaatagaatctcaagattcaaccagagccagtacattcggaaggaggtgtttcatcgcagtgtttccgcccactcattccccacgctcataggctcccgcaaccgcgatgagcgtctaccgagacaaatctggaactccctaaaccacttcaatgggactttgagcattgttctcttgttccatatttggagatactagagtgtttcaaactatctaagaatagtgcgcgaactcggattctttattttggaccccaatattcggggattctcaccagcctcaattacccctcccagctgcgagccgaaagatatacaacagctctcatccagtgctttttccagactatccccaatgtaggatgactgctcagcctcgaccactaacttcacaatctctgatctgtgattcgatacaccagccactgatgtcttctttcacggaaactgcttcctcacaatttatccctgtcgctacgccgctggcgttcaagccaagagtttctattcgatcacaaccttgttttcgatatgtttctatgtctccattcacgtcgcttggcgcgcgcgccaggctaccatttcttcgatgcatcctctttttccctccctgggcatcataagccacgttgttgataccatggggcccgagcctccgattgcgcgaccacctcaaagagattgttattttttcttactctgtttcaccaagcgccaacgagctgtctatccacagatcggccgtctattcatgaaccgtcacgagacgtccctcgtgtcaacatttacccgcaccctcgagattcatgttcccatactgaccgccgaccaaaatcatcgccccgagctaaccctgccgcagtgccaatatcacttgtactattgcaacctcattcaacagcccagccgggctagctcaatcggtagagcgtaagactcttaatcttaaggctgcgggttcgacccccgcgttcggctattcctaaaaccaaacctgagatttctggtttgtccgtggtcctcatcaacggagatggaggttgacgaaagaaaggagagttgagagaaagaaagggaaggaaagagggaatgatagtgtggggagggtaattatatatgtcggatgattttctgacaagagattattgaagaggtttgcgttgccatcaaatgtaccaacaccaggtacagtataatcaaattaaaatagcattcaagtagttatacaaccctatatgacagtgtcatatacagttatgcttctcaacgggctgcaggatgcgctaagaccgccacctgcatgtctatattctaccaaagaccttgtttccgtccatggagcactgtttcgctgctctcttcaacagcccggccgggctagctcaatcggtagagcgtaagactcttaatcttaaggctgcgggttcgacccccgcgttcggctattcctacaaaccaaacctgagatttctttttttttcgctgatcaaaattttctctttgagcctcctccgcccatacatgaagctgattggccgttgtagccatttggtccactagtgggtccggtcggtggcttgagaactgcctatgtacaacgtatgttttgtgtcttgcctgcatagtggatatcctgcgcatgaacaagcaactgtacttgtcaggtcacaagtattcatgcaggacaaaaattcttcaccgagtctgactagcaaggtcaaatcccggccgccatttgtggcttaactaggcccgagcgcaaggcagagaacgccttgtgctgataaagggtttttctccggctagacatgcatgatgtatcattggaaagtctatgtaggcattgacttcacctttgaaataaccacgccatttttcctatgattcgtcattaagaatcctacgttgccaagaaaaagctacaagaaaataacattgctgatatacatcgctacatgtagtggctgcatcatcgggccggtttttaatcgtgcccctaaacccaattccacatgattcctaaacagaactgatttagacccactatgttaactgcctacgacttcggagatatggcgagtatacaagctccaagtataccaccctagcatggcagcctacaacggattacaattccgagttgagagaaacataccgaaggcatttgccacccaggctaattgcaacagtgggataggctcgctacccctcaattgggtcgtctgccttgagtatcgctttgtcctcatctgaaatggttgacatgttgaatcttctagggaattctttttcttcgcttcccctctttcgtctgccgcggtagccttgattgaaagccatgagttgcctttttgccaatcacatcgctgctagagagggcacactatccaccgtgcaaactacagccttggatgtctgaccatgaacgccagtctgcatgttaatgtgtattgagtacagcgggagtgctatacgtgcttccctttgatacgttaccgaatgacaccaagattgatcattttaccaacggcctaccaacgtcgagaagtcctaatgatagaccccctacatcttttcataacagccgtaagtgttaatatggatgttcggtttatttacgagtacagagaatacacttactttacaggtgcgtacggtgtaccagcagctcatagaacatatctgcactaagaagtagtccgaaaatatctcagtgcttaggaagagaagcgatttttagaaaagctgaggaaaggtctcactgcctccacatgaaaatggcccgcttcatcggggatagggaaataataaggtagtcactgatctagaatcgtcggaaataccacgattgttttttggaatatctactttccggcgtggtggattactccatttggtttggatccccagaaaccataatggttgaaaccaaaagactgggtctctaaacgaaggcatgttccaatgtctagcatacatgggtaatgatcttgagttacaccttactaacatgaataaacgcatctgctgacatgaataggaatgagtccatcacgcaaggaaaacggcggaaatgcaggacacttccgtctatggcattgtcaccgatagtttccgctgggattttatccaaatccgcgctaacagcgaagtatgaaacctacgagacatactagaatgtcactaataaattatctagttcgtaactcgacgatacagatggaaaaagagcaaggctgagtttgtgtccgtcctctacgagattttcgagaccgccacatgttcctccgcccagcctcagtagcagcgcaagtgaaggagtaaagattcagacaccgaattcataactgagttgagaaaccactataggcacaaatggagtagaaatgttcgtgctttgcccgagaagccatcctgaaatatataatgactcgcccacaactgtgagcccgttttagatggctactatcccatgaatcgcaggactagcacccgtgtttacatgtagagtattgagggctatgccaatctcaagcttgaagtgatgatatccatgtacgagggcagtcacgtgagtgctgactcagggttatctcgaactcgtgggcttccctcaggagcggcgtctagccgctgggcaaccggggcggggcagtctttaatctcaaggttgatcaactccacttgttcataccctctccatttgttgacgtggccgaattcttcgattacatgtactccttccttagttttacctttaccacccacataaagtagctgtctatactgaattcttgatatgcatcggaagacgcaataatctgcccttcaacatgaacacaacgagtgacggcgaagctatggcggccaagaagcaaagaaccaccaagaagcaacgaaggaccaagaagggacggtacttcattcgttgtgcggtcgtaccgttatccgactcggtgacctcgttgtgaagtctggccacctccgcccccaggaaggggaaacacttcgtttcatcatagcaagtacgacgatccatataccttacattcatgatattcgctgggaagatggcaaagtcgatgctcttataatggactacattcctggcaagcgacttgatgaagcgtgggatactttaagctctagtcagaagctctccattgccaataagctatattcctatttgaagcaacttcgtgagctgaaaggccactatattagggctattaattggggcaaagctattattggacgcattgcatcaattgaagggggtccatttgataccgaggcgcagttcaacgaatttattctaggagatttcgtcaagatagcaccagatatgctacgacattataccaaatttgcgcttatggatgaccatgagattgtattcacacattctgatttcgccccgcggaatattcttatggaagctggtcgagttacagctattctggactgggaatatgctggatggtatccagcacattgggaatattgtcaggctcttcgccaactgagaccaatgtttgactggccagaatatcttgcccgtattcttccgcccaaatttgagcgagaatatataggcatgactttcttagctcgtatctcacgtcactagttagctagatactgttgatattatgcagctacatacatagtcgcctactctaattcgggagccatgtatgatgcatccattgacccttcttgcctaaatactgcctcagcccgagcaacaatgtaaagaaaaaaagatcaaaaagaaatctcaggtttggttttaggaatagccgaacgcgggggtcgaacccgcagccttaagattaagagtcttacgctctaccgattgagctagcccggccgggctgttgaagagagcagcgaaacagtgctccatggacggaaacaaggtctttggtagaatatagacatgcaggtggcggtcttagcgcatcctgcagcccgttgagaagcataactgtatatgacactgtcatatagggttgtataactacttgaatgctattttaatttgattatactgtacctggtgttggtacatttgatggcaacgcaaacctcttcaataatctcttgtcatgagggcgatcagggtaggtggataattataccaagggcaataataccatttacggaagtagccgtcaagatataatcgtcggcttgttgatatcgagactgctagtgaggacttttccttgcggactgtggatgtcttatgttatgtaaatgttcggaaccgatcctctgttctgttgctagtgggactattcagttatccagagatattgcgacgtggcactagtgttgactgaaagaagaggagaccagatatattgagtttgcatgaatccaagtagcataaaatattcaagtattcaaattcatgagtttacctcccgacgctaatacgcaaaggggatgtgcgggtgaggtcatcacttgccctccgcaaaagtggcaccatctctcgagtctcaagtgcgatcacatcaaaagaaccatacatacatctcaaacacaaaatgacatctacccaacccttagagatgaaagcctggctctactccagcacagccaacggtcttgaaaagaacctctatttcgacgcctcagcacgcgcaccaccaaccgtccacggcaacaatgtcctagtcaaagtcctctcggcctccctgaatccagccgactacaaagtccccgagatgggattagtaggactagtagcacaaaaattcgtgatcggcacaccagcctcaccgggaatggacttctgcgggcgcgtggtggtcgccggcgatggcgcgaccgagttttcaccgggccagctcgtgttcggctgcctcagtaagcctgcccaattcggctcactgggtgagtacctagtggcatctgcaagtctgcttgcgcccgtgccagagggcgtggaggttgatcatgcggcgtccatcggtattgcgggacagacagcgtaccagtcccttgctgagtatgtcagtgccggcgataaggtttttatcaacggaggctctggaggatgtggaattttcgcgattcaaattgctaaggagatgggatgccatgttaccactacttgctcgacgaagaatgtggagttttgtcgtgggctgggcgctgatgaggttattgattactcagttgaggaggacttggttgctacgctgcgcggtcgtggtgttgtatttgatcatattgttgatcatattggataccctgcgccgatgtatcgcgagtcgcatcacttcttggcggctgggaagacatttgtgcaggttggcgcgccgggcgtggggacttttgttgataggttgatttggcctggtttcttgggtggtggaaagaggaaatatgttatcttcttctttacgaatacccgtgaagatcttgtgaaggtcggggaatgggtgcagaagggagctgtcaaaattcagctggattctacctacgagtttgaggatgctgttaaggcattcgagaagcttcgctcctcccgtgctagaggaaagattattgtgcatgtggccaaaccatgagttgagattgaatacaaatattgcgagtcgaagtggtctttttagggtttggcgagacaacctctccgcgccaaatcgggaaagtgtcacatctgagaaaggcatagtagcgagctccgacgtaaacttgacgatgtatctggctatgtgagtgaaatgaaatgggatttccctcttcctcatcgctaatattcaaaatcatcagttcaacggctttcttttgttcagtatgcaatatctattatttccttttctgggtatcttcggttgcattcctattgaaatccgcctgataatatgggaccatctcttctcgtccctccgcgaacaaccactcaaggatggcctgcataaagacaaacctcgatccattctttgcactagccgatatctctacaatgagatctcatcccatatattcagaaactctgagcagcacatctttatcagcccaatatataacgaagaaaattggatggtcatgcaattgaaatccagagttgtggacgttgagtgggcattcagtagtaaagcggacgccaaaaggcatttccagaacttcccccatccaaaaacgaagatgacggtacatatcagttgcccagatccatcagacccgggtcaaatggtgttgctttggcagaaactcaacttgctagtcgatcttctgatccccgtggctcggccgactatagagctggcaacgaatggaccgtggtgcgcagaagacccaccgactcactggggaatatacagagatcaattttatgagatggggggcctgcaggagtcaatccagtccggacccaaattccgtcctgaccacgaccttgccatgttacccttccttcgtctagggctatgggtccaagatccagaaacaaatgtgcccgcaatgtcagaccgtcatttcaaagacctattccagtccctcgtgtctctattcgatcaaaaagggatcgagcgccgattagagaggcttctcgctatcaccaaggacacagccgtccgccaaattggaaacgcactcaccgataccgacatgttcttagaaacctgcctggatgaactaccaggcagaacagccagcttccttcgtcttgaacgatacaaaaactggttcgaagatgggacaagctgggaatcgccgtatgagacacgaatgcgagaccaattatctacctgtccttgggttattatgaacacggatccttggctccatcgatcgaatcagagatacatcgttcttattctattacaccatttcatgtatgcgatgagagcaaatttgtgtgatggacttaggatttttgacgatgcaagaatatatacgacatgggactcggaattgtggtcgtattatttcccagatggcgtttcggagctcagccatatccaaacctggcttacgaggttctggtcccagaagtcccagtttcggaaattccatgcctatacggattggataggtcaacgacgggcggaagaaaatggagctgatgaatccagttgtgaatttatacaccgtttgagcttgtggggccattgaaggctgtcaaggttggatttatcggtgagtatcgaaggtaacagcatgcgtgtgaatctttggctcagttcgaactggacagtcattgttggttggaatattggaatctggtttatggtgcgagggaaactagctaaggaaactaacagatcatgttgtcactacaagttgtttattctatagttgagacagaatatcaaaggctcagcccattcttacggcaatagttgacaacttatacattgtatcagaggtgtatttgacagatgtgctcgactgtattataaaccccaagtcctcatctacagagcagaatgcttcaagggatcttctttcaaaggcgccgaataatcatcgtcgtccatatcaatcatttcaatccggtgggtcatcatgttctcctgagtctgcgcctcgaccttcttctgcaaccgtgcatcttccccaaagccctcctggctgttcagggcctcacgagcagcagatgattcccggtctttaacaccagccttgcgctcattctctaaccgctccttctcctgtcgcttatcctcatgggcaagagcagcttcttcgcgttcaatctcactgggatcaaggtcctgaagcccgataagggtaagaattctgccaagcagaaactgataccgcaggtggccactgatcagttcgcttacgttgaggttctcaacacctggaacaccttcaactggctgcaatcccgctacaccgagttgaaagctgcttgttcggtagaggaaagcgagtacagagtcattttcagagaacacgttcacaacacgtccgcttacaacactgcgaatcttttgccagtcctccgcgtttgaaggggtaggtgaccccatcaaaatgaccgattcgaccaggccatacgcgtctctcctttctaggcttttgaggcaggagaaaatcagccgagaccctagagaataccccatcaaggtcacgggtcgttctccctgggctctgttgatcagggcatcagcgaaaacctcgcccgctttatcggcgcgggctttagccacgctgaacgggttgtcgacgatgccagcaactttcatgaggcctaggggaagcattaccgcgctcatgatcgtgtggaagaaagtacgagccaaaacctcacgtccggcaaccgaccaagcagcgctagtcacaagagctgatatcgcgttacccaggttcatcaaaggctccatctcccagcgaagaccgaacacttcagagtcggcaccaatcacccgccatgggatcacgaagttcgactcttccttgacccaaccggtaacaccaatggtaacccgtaaacgatgatcttgtttagcagactccttctctttcacattccggcggggttctcctcgtatcggtatgaaggcaaagtcgtccacttcacgtgcgtacttttccatcatgcgaccagtcatacgtccaccgtaagcgccaaaaaggccaccaacaacgacgctacttccggccaaagtacctagaagcccagcagcagcggtagcgccaaggcccaatccgcccataacagttcccaggcccgccgctaccaatggagctgcgagtccgccagtgaggccaatcaaagcagctccagccacagatgcaaggcccactttccattttctcatgtcatcatttttctttggttgctccttggtatcttgatctgccgagagcgccaaagctgtctgcagcaatccgcgagcgacagtgacttcgtcttgattgagtatgttgatatctatgttcagactggatgtgacgttcaacatcaagactcttgagtaagcactgtagtgctctaggctgagcattaaaaggagaagcgagtgaagaataagcagtcttgttgcttttgggagttttgccaaaggtgtttccacggggtggtatatttcttgtaacttggccactctatctttatcctcgtccagtggaagatcatcagacttggcggcgttctgcaggtcttcgcctgcctttttttcctgatcatcatcatctttattgacgaccgcgccaacacgcaaaaggacagaatccctccaatcctcaaaagtggagagcgcacggatctttggccggggacttggctgtttgctagtagatccctgccgcggacttccagtgtttcctgacgcgtccttgtcttgtgggcttgagggcaagtgtggcgtgtcttcatcgcggtccgcccccggagatgggcgtggactggagtgattgggggaattatcctttgtatttgtatgctcataaagctctagaattcgaacccgcattgactcagctacctcagagacgaggacagttaagtcagcacgctgcgaccgatccaagatcgatgatagatcttgaccgcgatcgctttccgaagtattggattgcttagattcaaagaatcctccatgtttttctttgaaatttttgaacattggcgctgaatagaggtgaaaaaggagttgatgacttttcgaggagtaaacaggcagaaaccgatgttgttggagagggggcgatgtcgtcatggccccttactccgccaatggcctgaggcagaaacacctgacccatgttaagttgatatcactctgctttgcttcatgcggaatatttatgccttctgtatattcaatgccgtagaaagtcgagggagtaactcaattgccgatttcaacgacaaaaaatttcccctttgtctttgtcgcggacccgagcgcattcccatcccaagcggttccatccggatgattgtttttttcacctgggacacgctggatttttctccgtcgtccggacaccttttccttagctagggcctccttgagcctttcgattccaatggtttcctcttccatagcagcaggactttcgtcgcgaattctagccagcggcgcgacgccggtagtatcaacaagttggatctccttcacaaaatgaatttgagactcgagtgtatcaagcatagactgttcttcttcttggctggcaggctggggaagagccgagatgcgcagcagatgatggagttgtttcggcgtgattgacggtggcggttttgaagcgggattcgggaggagtgatctgacagaccagttcggcgcaccaagtaagaactcgatgtctgcactgtggcactttttggaagagtagaagcgacagaaggtcgtgttgagtcggggaggaccggggcgtagcgacttggatagccgagcagcagtgcgaagagaggtcattgcagagtctccgaggatgggaaatcctgctgtgggaagaatacagagaaagcagacgagcgaaatagaagcacagtctaatctgaacagcacagtgtaaaagtagtcataggttagcaccagggagcttaggcggatatcgagaaagaagtgacaccgcctccacgggcccgccgatcgatgctctcatcgataacaacctcatttgaccacgacactccaacttcacatcgaatatctgcggactactgcctattgcagggaaaacagacacatacactcaagatgactcaagatccccgtgtcctgctccaaaaagtaagcattcctccccaccttgcatgggcaatgacgatagtccgcatagctgactagacctcgcttgttgcgatgaaataggccgataaagcgctgtccggtgcctctagcggcttcggttggtttggaggaagaggagagaaatatgagagcgctgcagatctgtatacccaggctgcaaatgcgttccgagtacagaaaatgagtgagataccccgcggcctaactagttcgttgacttgccaaggggaagctagatgactgacctgcgttctcaaacagacaaggaggccggtctggcttttgagaaagctgcctccatccaaactcagagcctcaacgaacccgacgacgctgcaaataacctccaggaagcgttcaaggtctaccgcaagacagaccccgaggatgctgcccgtgtactttccagtgccatccagcactacgtactacgaggaaacctgcgccgcgcagcaacgcaacagcaatacctggctgaactgtatgaggtggaacttggagatatgaagaaggcgctagaggcgtacgagaaggctgccgattggttcgagggtgataatgctgaagcgtatgtatcccatgattttttttgatatctgtggattcggggaagtaactcggctaacatatactacaatgcagcctcgcaaacaagcactacctcaaggtggcggacctgtctgccctggaaagtgactattacaaagccatcaccaactacgaacgcatcgcccggagctctattaacaaccacctgatgaagtggtctgtgaaggattatcttttgaaggcaggcatctgccaccttgccacaaaagtatgttgtttccatcttattcttatagggaaacagagtattaattatttataggatcttgttgagactaaccgtgctttggaatcataccgagaactcgatccttcctttagttcgacaagagagcaccagctactcgtggacttgacccaggctgtcgagaatggtgaccaggaaggcttcgccgacaagctcttccagtttgaccagctcagcaaactagacaagtggaagacaaccctccttctgaggatcaagaataacattgaggaagctgaggaggacttctcgtaaatgacgattgatttcttcggtgattccccgcgcgtgatgtctagagaatattgactcttcggtttttggcttcttccttcgtttgtttatcttggaaatttctggtctgaaagtgaaaacagatcgatgctaccctcattggttatagtgtttttttttatctggccttattgtcacctagaaatatcaaatctcgaattcttgattatggacatttggatactactgttgagcgcggaatgcaagagtagaagattcgtaattcatcattctaagatgcctcagttctatatgtacttttttggggtgtctcatgcttccttcagaatcagcagagctgccctcatcatgtaatcagttcagtcaaatggtatcatatcatccacctccccagtgctattgaaatcaacagcttacgcagtaatggcatccaaagccttggatttgcgagggaacacgcgcttgtataaactgacacccacggagtcttgtgggttgatcttggcatcgaaggtagccttgaagtatccgtgtgtacccaggctctccttgaagtatccactgcggccacggcgggtccacaactggagtgccttgaaccactggatatcctcggcgttgaagaacatgtagcggatggtaacgaccttcttgtggatcttgtaggggtgaccagtgaggatggcacgcttggcaaccacgcgcttctgatcgggtgcgacaacagtaccggtaccgatcagttcgagttggtccagggcaatcggctcctccttggaatcagcggtctccatctcgtcgtcagcgtcctcctgctcggatttcttctgtttgaagacgagaataggaactgaaccccaagtcatgggtccaatccaggatgcgatggcactgcggccagggtgcaagtatcggtcgtacttgtgaacgttgttcggcgtgttatcagccgaggagaagatggggttgacgaccatgcggcgggctccgcactggacgacgagctgctccttagccttgaggggcttctccacgctggagttcagggtcatgctaacgttgaccacagtctgcttgtgctcatggcggagcagagagaagagagaaataggcttggggctgttgcgcaaaatggaaggaactgcgcgaaggtgaatatccacgcggacaccagggttaacgccgccggccaaagcctctcgaatgatgcggttcctggagcccttgacatcagcaaactgcaacagtcggcgccaatcctcgggctcgtagggacgatcctcggatgtttcccagtggctgagcttgaggttcttcaatcctcggaatcgggccaggcgttctctggcaagcgcgttggggtgcaattcaatttcatcggggaactccaagtcctcttcggcctcggtcttgcggctggcacgatagtcggccaattcctgggcttcgtcctctggagaggggtcaaggaacatctccgattgcgggtattcagtaccaccgccctcagtcatggcatcctggtggtctgggaacacgccatcttcgggtgctccagcagtatccatctccatgggctcatcctcatcctccatgtcggatccggagtctgagacgtcatcgagataccaagcagactgataatttgaggtacccatgggcaacttcttaggtaccgggggaatgtgcgagtcgtcatccgagaagtaatgatagtcatccagcagaacacccttcttttctgtctcagccatggaaaccatgtcgtcatccaccatttcaatttcttcgggagcgatagtagccatatcgtcctgatcctcagtcggagtatccagaatttgtgtggtctcatccgcgtcaacagccattgcgtcatcccgcttaggcttggtagttgtaagcggcgcagctgtgatggaatcaatctggaaatcgccccatccagggacatgaacgatccggtccgccttcaagccccttccacgaacaactccggtgatgacgacgtcgtctaccacttcctggttggactctggccactgaacattctcgacaaacatccagctgcgatcgtcccgccagcggatacccttgggagtagcagtgcagatagatctgatggcattagaagattcctgtctcgagtcgagagacataaccttctcaatagagggaaagaagtggttaatgaaagacttcaatgtagtagccacctgggggcgcttcttagggggttcaatcttgtcgagaccttgcacgacagccaacacatttgagataccctggccttgaatcgagcgcaacagcatctcgccctcctcatcaacctcaacttcagaggacatgaccaagatgacaaagtcggccatacggcacacatccagagcgctcatcaagtcatacttggcaggaacgtactgtacgctttgacggaatcgatcgatgcgcacacgggtaggcccatcgggcgagacatcagtcaagacatcgacgctctcattgatagaagcaatagcagcggcggcgtcaacatcggcggacaacggcacaattgcgacatgacgtggagcaccattctggccggcgaagacgctggtagcttgggatctttcctggtgcttcaacgcctgtctttggcgggcggtgttacggcgatcgagtttcgtcttaagttgttggtggggtgtcctacgaccgccccgctcatcaccttcgattttgcctgtaatagtataagcgttaaatttgcattatttaccatacttggacattttaaaatcatacctttggcctgatccttcaaggcgcttttggaggcatgcttagttttgtagggcttgtgggaaaccttggtggtggagcggtggtggtgcaccgtctgggcaggcgccatattggcgttggagcctttgaatcggaaagggagggattccagattgaagcgagtcagaggtaactcggcaaatatccagtcagagctatttataactggcaaatacacagaaataaaatcgaaagtgcctctagaaaaaaaaaagaggtaacgataagaaatcaaaattcgccagtggaggataagcgagcggtgagcgcaaatcttggcgaaattctgggcaaaacactttttttcttgaagctacgcttttcgtccgccctctgatcttcctcggttctttcgcaaacgaactcgagaaattgccataaaatggccgactcagcctccaacatggctgtcgccaagggcgatcatgaagccaaaatgagactcgcagcagccgagcaaacctacggacgaggcaaaggcgttaatgcgaagagtgcgcgggacaagaagctgcgcgcaaatctcaagagacaggaattcaagcacaaggaggctattcttcaagccaaggatgcagagattttgctcgagcacacggaaggattcctcgaaccagaaggtgaacttgagcggacatacaaagttcgccaagatgagattcgggacagcgtcggaatcgagacagcaaagaagggattcgaattgaagcttcccgatatgggcccctaccgcatggactactctcggaacggacgtgacctgctgttggcagggcggaagggacatgttgcgacaatggattggcgcgagggcaaattgggctgcgagttacagttgaacgagactgtgcgggatgcccgctggctgcataacaaccagttcttcgctgtggcgcagaagaagcacacttatatctacgaccaccagggaactgagattcactgtctgagcaagcacctagaacctctcttcctggaattcctgccatatcatttccttcttgcaagcgctgtgagtatcctcgcctctttgattccatagattccccgctaatcaaacctttgtatagcaaatgagcggccacctcaaatacacagatacctcaaccggccagaccgtcgctgagctacccacgcggttgggtaaacccaccgctctcgcacagaacccatggaatgccatcctccatgtcggacaccaaaatggagccgtgaccctttggtcacctaactctcaaacccctctcgtaaaggcactcgtgcatcagggacctgtccggtcactggcaatggatcgcacaggccattacatggtatctacaggtcaggaccaaaaaatgaatgtgtgggatatccgcatgtaccgcgaggtgcattcatactcatgctaccaacccggcgcatctgtggctatcagtgaccgcggcctgaccgcagtgggctggggcacccaaatgagcgtatggcgtggtcttttcgacgccgcgcaagccgaccaaggcaaagtgcagagcccatacatggcgtggggcggagacgggcagcgcatcgagaacgtgcgctggtgcccatacgaagatattcttggcgtaggacacgaccaaggattcgccagcgtcctcgtccccggcgccggtgagccaaacttcgactcgctcgaagccaacccttacgagaacgtgcgacagcgccaggagcaggaggtccacgcgctgctcaccaagctgcagccggatatgatctcgctcgatcccaacatcattggaaagctcgataccgtcaacgacaagaagtatcaggagcagcgcaacccggaccacaagcccgaagatcacatggagaagatcaagaaccggggtcgtggccgcaacagtgctctacgcaagtacctccgcaagaaggggggcaagaacgtcatcgacgagaagcgcgtcaaggccgagacgttgcgcaaggagtatgctgctcgcacaaaggacaagctcaagcaagagcgtcaggatcttgggccggctctgtcccggttcgccaaataagatcactgagtttgtttcttgcttgtgtgacatcttgtggagcagtagaggaacaacccccctctgcccaaaaccacccagatacccagcccacacgcggcttctgtgacatattggagatttggcgacagctgcattccaggcgttctcggggaatatgtttgtattcggacggaaaaagcagttaaatgtgtgtaccatcttttttcaacacattgaatatattgaacttcataactattttatacttcttaaacttccaattccacttcgtattccccttttgaagttttcaaggctatatatccaaaatcacaagttaccggacctaaacctaccagtctaaatagaacatctactcatcaagactcccagaccccctaacagccccatccttccacctctgcaaactaacctcataagctccactgcccttccaagcactaataatcaaattaacaatatgatccatccccttcccatgcttaacgaccgcaaacaccgtcggtcccccctccctcatcttcgccgcatctctctccatgacagcaagatctgctccaacagcttcagcaagatcaatcttgttcacaacaagcagatcagaccccgtgattcccggtccacccttacgaggcaccttatcaccacccgcaacgtcaatcacgtagatgatgaaatccgccagctcgcgcgagtagttcgcagccaggttgtcacccccggactcgatcagcaacaggtccgtcgtgaactgcttctgtagtttctgcagcgcgagcaggttcgcgctgatgtcttcgcgcaccgcggcgtgcgggcacccgcctgtttcgatggcgcggatgcgtgacggcgccagggctttgtggcgggttaggaattcggcgtcttctctgtttttcgagagaatgattaataatgttggtgaggtatggtaggtacgagtcttgttgtttcgggtgtgggtgtggggttggtaggtggggttagggtattctctcgtaccttgtgaagatatcgttcgtcactgcggcgatattatactcgtctcgaagggcgcgagatagcgctagcatcagggctgtcttgccggatcctacgggtctattcagatccaagactcatgtgttagtcactggctctgcatataggtgtggtgatttgaatggatatgcattggtataaagcaggtgaaatagaggttgattgcaggatagagaatggcaacatacccaccgataccaatagtgaaggcacgatccttccagtctcggccttcgatcaggggcatctcgcggttgacgtaggagcctgggccatcgaggatatcgtgtgcatggccgtggccgttgaaggggtcatcgtgaaagtggtcaatgccggcgtcgtgggagtgagagtgtgccattgttaagcttccaaggttgatagatgttaagaccaagtcagctcaggattgtttagagaaaagccaagatgaggggcagttctatcccttggaagggtgtggggaactgatatgataaaatgccgagccttcgatatcatcgattcgccgctcggtttgttcaaaagagggatactcttctgtaaattgctatttggggatttatgctggttggaatatttaagaaatatgcaaagatgtccccaagggagacatttcaacaaataatggaggactgcatatatagagagcccatacttcaataccttcatgtatacaaactacgatgcatcaatgaagattgaaaagcatgtatttatggattcgtcaagcagcggcagagagagtataagccccgagggggaagagatgtcaagccaaatggaccatagaacacccctatgcacgcagacgtagttcccaatgaaacgtaagagccggacgcctatcattcgccaaacacggatatcaatagttctgcctgttcacaagaagaagaaaatgaacagactgccaaggaaaaagcgaataatgggcaaaagtcgttaaatcccagacattgatggcaaaaggatgaaaatgaaacccgaacagtaaagagatagaaaacatgcaaggccaggaaataaacccgagccaacaaggaaacgctgaaaggaagatagagtacattaggtcggagttgagcaggatcgatgaggcctgacgctacttccaagcgaaggaagatgggaggggcctcaagcactgattaaatcccgtcgattgtgaattgagtcgtcatgtgccaaaaagcaagatagatctttcaggtagatgaaagacctagatgaggagtaaacaaacaagagcgggcgcgacatgcctcgcccaggtatccagtcgtacgccggtcccgtaccgcctgagacggcgaggaaaatgaacgcaagggaaagcaaaccaaactcccaacatgattaggcggcggcacccttttgtcgcttcggcacccgagggctagcctttactttcgctgagccctgctgcggagcaccgttagcttcgactccaccaccgtcctcggattccattttgacggtgctcgcccggcggcgtttgttgccacctacatttggactgttgttcacgccggctggggacggatgcattggtggttgcattccaggggggccggcaaggttgctttgggctgggctcggatgtgctgaaccagtcagatgaggcgagccttgctgcccggggagaccaagatgagccatggcaggcgaggcgaactgtgatggagcgcccatgctatgtccccgaacattttgcatgggttgcatgcctgggttcataccgggattcataccgggattcatgcctgggtgcatcgcgtgattcatgcccggactcatgcctgggtgcatcgcgtgatttatgcccggactcatgcctgggtgcatcgccggattcatgcctgggttcatgcctgggttcatgcctggattcatgcctgggttcatagctgggttcatacccggactcatgcccgggttcatgcccggattgatgcctggattcatgcctggattcatacccggattcataccctggttcatacccggattcatgttctggttcatgccctggttcatgcccggattcatgcccggattcatgcctggattcattcctggattcatgcctgggttcatgccctggttcatgggcatgggagtcgatacaaagccaggattgggattttgtgattggagggtgctgacaagattccgtaaagcgtcaggaggtgataactgcggatttgcctgagaaaactggaacaacatttgcatcgcagaaatggtttcagctacttccatgaatcccatgactggagttggcacgccgttggcagtcacttttgaatctggcaccaatgacggcgtttgcttaggctgggcacgttttgagttctttgtgaccttcggactttgcttttgggaatccgcctccatggccaacaacaacgaccgtggaatgaactcgttgtggctgacgacattaacatcgagcatctcaagcttgttgtgcatatcgaagtgcgcgcgcagcgtgccgttggtgaaaagctaaagcgatagatattagcaagctgaaaagaaaatgaccatgcgactagagatgtacctggcactcattcttgaaccaataaatgaatgaacattttggcgcttcaacgtaatgccctccattgtgggattcccgctcgcgagcaccttccaccaccatctgaatttgactaattccgctagtgaattgggtcaaataataacgtgccagtgcgggtgtcgcaatttcgaattgtttagatccaatcgtgttgttccaaacaccctgcctcaagacacctacaggggagtagaaccgctcgacaaacgattgccaatatagaagatcctgtgcttcattgcgggattggaagtttcccaaatgttcggcataggcatgaatggtcaatattgcgttattcttcctttgctgctgctgttgttgttgctgcatcataagagcattttggtgctgctgtgccttcatttgagcctcctgggccatcatctgctgattctgaggacccggctgatggccctgggaactctgagaaggctgcggctgcggctgcgggccagcctggccctgttgacccggctgttgagattgtggcaattgctgcggtgggggattaggagttccctggccttggggcaatccctgcgattgtggtggttgagtggatggcggctgagaagtttgagagggttgcggtgtgccgcctcctggcccgccatgttgcgactgtggggtggcactctgttcgtgcatattcggaggttgtgctgatgtacgctgcggggtatgctggcctgacggtccattattcccctgttgttgagcatattgagcctgctgagcctgctgcgcctgctgttgagcctgctgctgcgcctgctgctgagcctgctggatagcgaaaaattgctgctgctgttggagacttggcggctggccatgtggcatttgctgctgaaggtgcatcatattaacgggtcgcattccagggttcgcttgcattgcagccatttgcgcagcattaagtccttgagtaccattaggcattgatacgggaagaccctgttggtgttgatgttgttgttgttgctgctgttgctgttgctgctgttgttgttgctgctgctggtgctgctgttgctggtgttgctgctgctgctggtgctgttgctgctgctgttgttgctgctggtgctggagcatcattcgttgccgcattaattgttgctgttgctgttgctggtgctgatgtaatagatggggattattcgcaactatgcattgatcaggacgtaagtatgcgatcgagaaagacggctggaagagacgcgggtgtagcggggggaagaaatcaccgcagagggcagggaccgcgtgttccgtaacattacatctcgcaccccatgcgttaagcaaatagaagattgaatactaacaattttgttggaattgggggttctgaagcatatgcgcctgcgcgggattcaggtgggagagggcatgagcatttgggccggggccaccaggaccaactgccccagcgcccgggggcatgccgcccatcatcgggcccgcttggctgacttgaggtcctcccggcgcagagacgccaggatgcatttgctgtaccattccagcgcccgggtgtccatttggatgttgcgcggccattgggtgaccggggggaaacccatgttgcggcatgccttggtgggcaggaaacggctgcgtcatcatcattgctgagcgacgaagtcaccacaaatgggggacttcaaaatgatcgctcgcgatggcgaaaatgtggtgggcgaaacgtggcgtggagcgcgactggagtgggaagacaacaaggccgcttttagcgttcggggatggaccaagacgtagcgagcgacttgaaccggtattcagcagacgcgaggtgctgaagtatcgatcggggccaagtcactcacccgcgcaatgaatctgttttccttctgaaacaagtgagcggtcagtggggagtgataagagaagatgtcggggatgaaggttaaaagtgacgggggctaggggaggcgtggaggggctgggctctccgaacagtcagaatatctcaaagaggcacaactcacaagtgtttttgctaagggatctggatattagggggctaaaggtgttgcgaacgcccaggttgggaattaaggatgatcgcccggtgggagagagagaactggagacggaggatccgggtccgtatggtggaggatctaaccgagacgacagcgcgattaatccagagagaaacagtgatagagggaaaataaaggactataatgagatcaggaaattgtatagatcttaaagtataagctccatctttcaatcttcattttttccctttttgaggcttttttcttctccttcccctgctctgagtccaatcacacgctatcccgaatgaggatgggtcacgtggtgtcttcgcggctttttcttcacaactttttttttctcttctcttcttcttcatcttctcctttgtctttccttcttctttccaatgccatctttgaggcataccaccactactgtgaattcctattggctctgtggttctctacctcaggtttctggagctctcttaatgttgattgcgcctgactcatgaggatagcatgatccaatgccaacagtatcttacgatccctcaatctcaccactaacctgatagatcaggtgttagcaccttgtgcttaacgtgagtttacatcctttctcgttcttcctgcatttgcatttcctatccgttcaaggatgacaaaacactttacttcttaaccctccaattcgacaatgcggagataatccggacctcccttcccggttggtctgctacttgccagtatatcttgtctgagaacttttattttgcaatgcatctttatcatgtcttgtcttgagcaattaactaatattgttctcagtctagatcgaaacatgaaccacgatgcatagaaggatatcgcctgttgtaatggcgaattgatcaagtgacgaaaaatttctcggatgtaaactcacagacctgttctgaatgcgcaaaaccgtgtagagatttccgttgccttccttctgatgatcaattcgctattacacctgtgtgttgtctggatatatagttgtggaatacccgaatgaaactttattttgacttgaagaatgtctgtcttgtagtttataataagttcacacctaatcctgaatgaacatgtacaagtattctaccatactagttatctactcagtactccgtaagccttaacaatcgggtgaagattccttccgttgtagggttctgcgaggcctcggttctcccaaccctagcaggataatctcttttacgggtcaaatattacagtaaatgttgcggacgacaacttgaaagcttagactggcagacctaaagttgcgttaactaactagctaatggcctagatcttacttgggtgtataaggaatgcttcgccgatcaactacgccacgcagatcgcagctcgcagctcgaatatgtcaagttagtagagacattatatctgtgacaatctgagagtacgactttgcacttatagaggaaggagcgacttcctcgaacctaagcgagaaatcaccatttgcatggttcgctgaaagagcccgcagaaaatcagggagcagaactcgtagacagttaccctttcccttttcctctctgtacttagtattgtgatgaagaagcgctcattcttttgaatcgaactggcacataataatatctgtcacttctcttctcgcttcatgaaatcccctgttcgtaggctatgaccttgtacttaaagggcatatagtgactgctcgaccaaggcgttcattcaaacaaacttatagcgcagtcttctcccccctagagctaccgttcccggaggaccgagttatctgcaccctggtcactcatagaccatggttacatcgagagattggcggttcactgcatcttcgttcaagaacagattttatagctcctcaatcgtgatatctggtcgatcagactgacgatgcatatagaacctgaaatcgataggagaggatacttccctgggatagtattgttagggcaggatagggcgctactatctgcaggaggaatagaaaccattgggaaacgacctatcgtcgtacgcggaagtcttgaataaattggcaacgtatgcctggatgctcattggtatctgcgggctggagcaagacaatatcccgtactggaggcgatgacgagggccagaataaatgttgccagtgaaatcacatcggctcgcttggttctggcgctttctaggttgtagggagacacacccggggcattacaacactggccatgtaatatcgctctgggcttatccctcagcattggtagcgcttgtttttccttccgcgagaatgtcgggggttacggagtcaaggataatgaaacaatatttttcgatattgattggttggctagaggaagaaagagacaaagtaactatgataggggtttgaaccttcaataagtttgttcgaaatcccgaatcctggattagccgcgtatgtgagatcgagccgtactcacaaaggttgcaaaatgatgttgagatatacatgatatgtttgaggctgttcagaggtgaatgagaggttacatagtttgacgtagagtggtctatacatagaatatcgggcatatgtcctcgtacctctatggaaacaagacgtgatcaacagagccaagataattattgatgatgatctgaatactactaccccgtataatttctctaaatagcttcatggagacaaagggacaaaggcctgaaaagcaggaatatttcaaatgggcaaagggagatcttatagactgcatgccagcaagcaatacctcaatgcatcaaaatgtcaaaatgtcaatgtcatttgatctctagctgttgtggtcaagaaaccgaagactgttcataagtaccttttgtatgggaagcccatacaaaaggtacttttacattagtcgcgggggaacgcgcggagcgggtatgaaccttcagtgatcctcgactgaagaatcgtatgcccgcggattgaagatgtgtgcgtgatttgaaatttgagctcatagttctttttgtatatgtatggaacatgtataaattgtaccgacctcataacaccgaacctggctgacgaaaatatattatcacgtgactcctcatttctccttcgtagggtccggtagggaccctgtgccactcgcgatttggtgcatacatctattactctcggcgatatcgcataaagctccggtgacactgtcccggatgtattcgtcaatgcaacaagtccggctgtcggttgcacgcccttgtcgatttgtcgctcgccgccgctattccgcaccgctgtccgcgcgacgattccatctgtcacgaacatggctcgcatcaccgtctcaagaccctcacgatgccgagtctacagcgccggggaatattgtggaagatccttccctcaaacctgagaatatctccgacaatggcacgccggcgatatctccctccaccgaatcagcaaagtcgatcactaaaacctacggatctgctgtacgcagagcgatgcgaaaccgaaagtccccgcagcagactttgccatcaacgacgactgtacctgcatggttttatgagcataatacggtgtctcacagcagtgaagaccgccctacacaatcacaccaacaggttagaataaccaagtcagggctacaaaaggaactggaggaggtgaaaacagaggttcaagcttccgggggagattcggacccatctgcatccagtgataccccggcagcaacagagaatcggtatgcggtggccgaagaatcatgggaagagctgcaggcctccgtcaaagcaggcttgcggttaccagctgtgaaatatgccaaagagccttcggtaaagaagtcgcatctggcgctgcattacccgggtagtgatggtataccattcctagacgcggtggtgaagaagcttgcccaggagctgggcactgacctggtaactcttaatgcccaggacattgcacaattgttcagcgagcaagatctcgcagatgttggggtaacttcgcccattcgatctctcgggtatgatgtatatcggcaatcggccccaacttcatggtcagaacttgaagatcctgaaggagacggcgaggatgacatgactgaaattgcaggtggtccccgtggaatgcgtggcgatattggcacacctcggtttatcacaattgagagcagcaaagaggccggtgacattccgcttcctaactggcttgggctgaaaaccctcttggggggatcgattaatggccaaacggatccggatcccggggccggggcctcatcaagtggtcagcgtgctgaaactcggtggattcaactacttaatgagctcctcgggtcatcaggtcaaccagcactgtcagaccccactgagataacggcaaatgccgaaacgaaacctagcaagccttcgccaactcgagacctcattatgcatatccaggactaccgtgacattcagaacactcgggaggggtctaaattcatttcactcttgcacaaagtcattcaagatcggagagcggcagggtccaagattctgttgattggaactacttctcaggaaatccaccactcaccctcacaagatggtgctggtctgatgcaaaatgttctcgatgaccagttctcgaagaccttgttcattacccccgccatgagctcgaaagacgccgaaaaggtcttcgcagaagaccgaaagaagcgcaccatggagatcaacattcgccacttgcagacgatgcttcgcttccgattacatgaacaggctctgcctgtaaaagataacatcttaagcgaccgcgcttggccgctagagccttcaaccatcaaagaatcaggaatccaggatcggtactggtcgtacaatcaagtgcattggatctctacacttgcacttggctgcactgaagtcaacgaggcccttgggtttgagcacatccgacgtggaatcgagctcatggataaaagcgaccgagtcaccaatgaatggctgaaggagaagtcacccaagcagaaagattcggaagcggggcagaccagagagcagctgatcaactctttgcgcaaaacgtgcaacacgcacgagaaaaagctgcttaacggtgtagttgacgcaaaaagcattcgaaccacattcaacgatgtgcatgtgccccccgagaccatcgaggccctgaagaccctgacttccctttcactcatccgccccgaggcattcacttatggtgtccttgccaccgacaagatccccggccttctcttatacggacctccaggcaccggtaagacgctcctcgctaaagccgtagcccgcgagagtggagcaacagtcctcgaagtcagcgggtctgaagtgtacgacatgtacgtcggcgagggcgagaagaacgtgaaagcgattttcacgcttgcaaagaagctcagtccctgcgttgtcttcatcgacgaagcggatgccatcttctgctcgcgcaccggagccagcagccgtacctctcaccgcgaactgatcaaccaattcctgcgcgagtgggacggcatgaacgacctctcagcattcatcatggtcgctacaaaccgaccatttgatctggacgatgctgtcctccgccgtcttccccgccgtctactagtcgatctaccaaccgaggaagaccgcgaagctgtcttgagaatccacctcaaagaggaacagctcgaaccctccgtcgacattgctgaactcgcccgacgcactccgctgtactccggttccgatttgaagaatttatcggtggcggctgcactggcttgcgtgcgcgaggagaacgacgcagcggctaagcacacgggtgacgagccgtatagctatccagagcgccgcattctgactcgcgcacatttcgagcgcggaatggaagaaatcagcgcttcgatcagcgaggatatgtcttcgctgtcggcgattcggaagttcgacgagcagtatggtgaccggaagggtcgccggcagaagagccctgggtggggattcattcctggtgctagtggtgctgcttcggctgattcggcgcgtgtgcggacttgatttttgttttattcgaggttcctcgccggattggggaaatggggattccctttgtacttttagcgatactatagacctgtactattactcaaatgtatatactgccatccatttcttgggcaataaacatttgcattgtttctatccagatgccttcagatctagccttgaggtagtgactacgtggctatacctgcctgctagatttctaactgtaaacccaacacactttgtgcttgttatacgagtgtcgtttgcaaatcgcttggaatatttcttggcctttacatttggagtatgcctaatgcagcaaccctgatagagtaggcagagacattcgtgttgccaggttcctaccgctaaatttcaaagttctttttcttccttcatgatagaatatatcagcctaatcaggcagcatgtatagaaatagggatataaggcgagagaaattgctcccttctctgctcattgatctgatatatcctaactgcataagttcttctgttgcagcattaccagccccaatatgtcggtacgtggatctgctacaagcgctatatataagtactaacagcttgctttctgcagaatccatcggggtacatctacattcccagcaaaagcatccatggagaatgtgtcagctaaccaatgtatatcagtatttctattgcagatgaatgcatgtctgcattcaatcaactccgatcaggaccagaagccaccaggccaaagttcatcatctacaagatctccgacaacaacaagagcgttgtggtcgaggaaacatccacggtgaaagactatgagttctttcgccggaagctgtcagctgcagtcgacaaagatggtaacccagcaccacggtatgccatctacgacatggagtatgatcttgggagcgaagggaagcggtaagagattaccccagagacttaatgagtgtagtggaataattttggctaattccaaaaccgtatgtgcagtaccaaggctgtcttcgtccattggggtccttgccatgcgtctatcaaggtaatttgtctttcaactcgcgtggccatgaaatgctgactgtcttggttgcagctgtccatgctctatgctagcagtgtgcaacaattcaaaagagcctttggcctcaacgtctctttttttgcagacagcctggaagagcttgaatgggcggttgtcttgaaggaggtcagtgggggccaggcatagatgggtctggggaaatgatcggcattgctaaagtcccgtgcatggagagggattgtttctctagagcaaagtaacaagatagaaatagtagtaggtgaggtgttggatatgaaatattgatttcgaactggcctttgagaacgtgctcaactagattttttgatatgccttggcaagggcaaatgtttgaagttgcatgatgccacatctgtactttcatcgaaccagctgccaaagttggtatagcgcgttctatcgacagggatttatagcaccaatggatttatagcactaacctggcgttgcgtcactccatatgttagattgaccaggcgaggtccctttctttcgatggtcttcaatcactttgtgttgcccattgtaagattataaacccagagtttagaacgagcgatatatatgttttagcaagatcagaattaaaacaaacagaccaaggacgaaagatatgtcaaaatgaaatgaaaatcaagggcaaaaagggtggaagcttgtatctccgcattggggcacgtgcgttatgacatgagtccgatcatcccgccaccctgactttgcaaagacctcccaaggttgcttgtttgcttgtttgctgctttgcatttcccaatttgcatctttcttccagttgagaacatcaggagtgcacggacaagcaagaaaaaccttcgggccaagcaagaaaaacttgctataaagctccccactttcccacccgagaaatccaccacatccatcgaatcgtgaaaatgatggccaccgggtctcgggacacctcggttcgtgaggccaaaggcttcgtcaaggatgtcgtacgaaatgactgggatttcgaggccggcgttccctccccgtcgtctgccgacggcaccctttgccacgaccgcgaagtgtgcgaatggcgggtccgagaattcgacaccccaacctcggaactcgagccacagagctcggacagcgagcaagagtatgatccatcagccgtgctgaacctcgccccgggagctgcaggtattgagcggcgtcgcaaacgccgtcgacagatagacgacgaaatggcatggaacgaagggctacgtttatggatggccaggcgcgatgcgtggtgtggtgcgaagactcggcggcagattcgggcggaggaggaaaagcgcgcgttggctggtgcacggacggacacaacagatcagcccgatggcgtggggctaggagaaaatggtgagactttgtctgattcaacccaaactgcgatgccgcctggccagggtagtgagggcattggtgcctctgatctagcagcccagaccgagacttcactttccattgcggaccgggagaaaagcgagcagctccagaatcgagcggatatgacctcgggacagcaagatgatcaggaggatggattgtctaccgcgccagacgagggagctaaacggaaggcctcgtcagagaccaacatcacagagccggatcagaaagttgccgcaatcgtacctactgaacttacaacctccccggccgtggaaggccaaacagaagaggagaaggtggaagaagaacttgatgaaccactttgccccgttgccccgccattcatttcaaacgacaacccaattcgcgcaaccatcaatcccgcaatctacccttcaatctacaccaaggtcgtcgtgcaaggcatgaccccaaccgtccccgtcaacctcgcccacttgaccaaagccatggttcaaggctggaaagcagacgggcagtggccgccaaagccagcagtgacatcgattgtccttgctgatgatgcctccgtgcccaagaaaaccacagaggacgcaccaccggccaggaggaagaatagcatcaccaatgccgtgaagaaagttttccattttggaacgcatcccttccatcgccgcggcagccaggacaccgcgggagccgggggcccgacggcttaagtggatcctactatttatggatcgtaagtaattgcatagccatcaacgctagtgcaggtcgaggaaatagcttcacctacctgggttgctctggcttcatcaggcgtctactctgggggttctattatgttttctttcgtgctcaaaatctgagcatgccgatgttttatttacttctagttctgcataatgaagaaatgccatctcaaaggttgtacatagtaaagtagttttcacaaattaggacctttttcgcgtcttcctgccgtctacttgagaatggggagaagatgtctaaaacctagaaagacatctaagaataccccaagtaattcagcctgtctgcagtatttctctaaaacaatcccaagacataatacataatattggatgttactacctagcagtcgagctactgacttccccagtgatcgacccaacatagacattgaagttataatgaacacagctatccttaacatccaaacttccttgcccactcagaatcgtctgtccattccgagtcacatggaaagattgagcaccaacccccatagtcacattcgaggtaacaatccccgctggaatatcaatgctaacaggagcattattcccactctgcacagtcaaggtagcgggattcgtcaacatagtagcgacaaaaatactatcactgagcatacccacacccaatggcgccgagagggtatcccccgtgcacacgacacccttgggtgtaggtcggtaccagtacacgacttcatctgcttccacggtaggggcttttgctccggatttgtaggctgcgatatacggcttgaacaggttgcgccagccgtcgtggggcatatcggctgcccactgggaagagccatcgtcgctgtgattggctgagtacgggccgatgtagtgggattcaccgtagtctatataactttggttaggagagacttttccggagaatttccaggatatgtaggatagatataccattccatgagattacctcaatcaggcctggctcaagggaaagcatctgttcccagcgtaatgttggcaggttctcgcaaacgaagacccagtttttagtgttgaagtgcgttgagaaccagggtgagacggctgtcatttaagttagtttactttcactcagagaccagaactaggttcaagggttgctaacgggccatgtaagtcttccctgcgagataatgaacaaatctatcatcccagatggtagtcatcgggccggggatgatactatttcccccatctgtaggccaagccaaccacgagaaggcaccatcagcgctctgagcagcatcggtggtagcttccgcgggatcttggagatttggcaatgcgtaaataggatttggtgttccttgcctcactgcatcccagttgaaactgtctccgacaaatgtacttaccaccgcagctcccttgtattgcatctgcgctgggtggcctgcatattgtttcatgtacgccgtgatcttttcggtatccccgttcgtccaataggcgaagtcgaaggagatgaatactttgaagtcaacttgctgggctgcttcataggctagggctagctgggttggggtgtagctgtctatgcttgcacagttcagtgcgaatgcgtcgatgccgatggattgggccgtggtcatgtcttctttccagtctgataactggtagttttctactataccgacctagatatataggatctatgtcaatggtgggaaataggaagtatccaggtgctagtatgctaaccatgaagtgggcgaagacatatttgtcttgcgattgactggtcaactctgaatccggagttgggatagctaaagctggcaggatatgtgccaacatagccacagtactaaagagggatttccagatcatcgctaaaagttgtaccagttcttaattgataagttgatttctcaatgatgtgaatttccgtccgtcccttaacagattatatagttcaccccctgcatatattatacgatattatacctcccaaatgcactgaattccaaccaaaatgaagcaagacaactaaaataccaatataaaccttgaacaataacctcaacggcgagtataaaacttgtttcacctttccccgcgctatattgtaacacccgaccttccgtcacatccacgtgagattgtgtagtattcgcaaaccgcgtccacttttgaattaaccctttgcccctgcagcatatggtatcgccgtcaggctcgggcccatatatcacgctctaaagaactcaatcaggtgttgagatgctacagtagtgctgagtatcacgagatgtattctcacatcaatctttacatgccaactgatcgaggcaaattaatatgccgggcatatgaaactcctgggtaaaactcgatgtatggattaacaccgatgccgccgtaaagtacatttgacaggtcttggcctgtggctttttcgctggcccatacgcatgactgaatttcggaatgactaaagaatatgtcatgcgtgaactgctattcaaatcacaatactatcagaacatgacacacgcattgtgctgttgtatttggtcatggtagcatcttgcagtcggcaggaacatcctccaatttgaagagaatgaatagcttctgatagagatgaggtcgtaataaggatgttgataacaacggaaatgatagtacaagatctctgatactaagattatggactcagaataatatatgacgtgttggatccgagacaggcaactcgggggttctgggtcatagcgatcaatggagattaaattccacggagattgcattccatactgacctgcatatccaggccagtcgagggtatgcggccctgattgatgttagactgtttgaactggactcgtttggcatagcccttgcataatgcatgattcggctccttctgaacattctcacctaagccgtcactaagagttgtcatgattatatctattggaggacctcgtacagtaaggaatgcattgaacccgaaggctatgactccattagagtaacaacattgtcaatatggcacagataacattattgattcctttttgatattcgtgacacgttaaactccccctaagaacgccgtgtatataaagatcgaacagaaataaccacaaggtcaagacaataactccagaaccgtcgcacgatcaacgaaacctctcgccgcatcttcgaaaaccttctgcgcttcactctgactagccactagaacagcaatctcaggctcgactttgatctcctgtaactcatgaccgggacgagtaaagtagtacttgtcctgatgacaagaccattttctgagatagagctggagatcattcgaggcgaggttgttagccgtactaaagagttccgttttcctgctatcagaggacggcggtgtagcagggaatatgacacgggcactgctcgacgacaagtctatgtctggatctgtgctctgtagacatctgctcacggcgttggcgaaatcgcggatccactcgatgtacgtgaaaatacccttccctgcaccagtgactcgatcgatgtaatctaccactggtaacactgaggagatcatgtctaggaaggcggcaagcatgactaaggttgtaggactttgcagacgatggcgacgggaggcgaccacacccagtgcttgacaggaggctcggcacacaacatcaatgatatcgatcacagaagacacacaggctggatccagagtgtctatgttacacagcaggtttttgaactccagtgtgatggtttggatgatgggacggctgaggatccaggcggcgcagttgggaagcgtcgcttcgagatacgctggaaacacgcattgcaagaggacggcgcggagagtaggtttgtcgtagtccccagcctcgtatgtgtgtttcatcgaggtgtgcaattgctcaactaggtagctctgttggccgtcaatggcagcacgctcggaaatgctctggacaaacccggtcaaggtctggatctctttgctggaagataacttcgactcgtagcgtttgagcttcgcaacaatgtagcgtgggtcggtagacggcaaggggaacgaagcagggtccgtaaagaagggatcgattggtttgatatcgctggtatgttgctgaaggaaaccgatgacgcgttgcacgaattcaacgtattctccttgagctgcctgcgctgttccattccctagctcttgatagttgcttttcatggaagtcatcacccgatgaagcatctcggagtactcctgttttgtcacggagaagttccgattcccagaaagctccataccatagagctgttcacgcatattagacgataggctcgagaggagagataggcgccgagagccaatttcctccaatgtgattgtataccggccaatcttcctatccttggagaacggaagattggcaagcaagggatctgtgggacttccattcaatagcgcctccgtgagacgatgttggaacttcaacatcgaggaacgctcgaccaatgatgacatccacatactcataacttggattcggcaatcagaaacaatctgcgcgtccttttcaatacatgtcgcaagaaacagcggtgcaaactttcttgtctgaactgtctgtcgaagccgcgtccatgaatcatcgccgaactcgctcagataattgtcccagtttcggaggccatggcgaatgagaacctgagcgattgacgtccagcattctactacgttgagaaggattgcatcctcgggacagtggtcctcgccaaagcagttggaaacaagacgagagacaatcggatggaaagccttctctacatgttcaataccttcaccaggggaactttgctggtcccagacagcctgaatggcatcccagtcaccgaactcctggctgtcctcatcagtattcactgccacaggagcactcgatgtggatgtagctggaacgtctttctgggtgtacgccactaggacctgcagagcctcagatacaacgacattcacgcgcgggagcttcgggttgaaaagtgcaagaagagactcgaaaggagttctcagaacaagcctgcgtgcatgctccattttcggagctagctgtacagcaatccgcagcccgctaagcgcattgctcagcaaagtctccacctgccgctggttctgggagattgtgcgttcaacaacctgctgagaaacccgattgtcgccggtattttgagcctcaatctctttgcgagcatatgaatgctgttgctgcagttctgtaacgaaataaccataccagtctccaaacggatcgagccccgaaacctcctcatcggtagaaagcttgaatcgaacaagccttgaccatgaccgcaaattgatgctgcacgcttcacgatgtgaagtggcaggatggaccagattgcgtatcgtctccagtcgagggcgacacccatcaggaacagcccagtacagggtgctgagaagatcgtgatgatttcttagtgcgtcaaggtcttcgtgctgcaatggctgttctttcgggtacacacggccatggttgggtaaaagacgccaggcaaagtttcgaatctttttcttgtcatatctctttgccaagaagcggagaccacttgctacgatcttgagaaatgtgtggaaacacggttctcccactcgggcatccagagaaggattgttatcaagttcgtcaaggaatgaaggtgagccccgagcttcttcgagtttcaagttgtggagggtattcttagcgaagaagtcgaataatgtatccaggatagctttgcattctctccaaccccaagaattgataagccgatgacatctgaggaacaaggttcgacagtagatgttgtatgaaatgggttgtgctttagagttagactcgaaatggtcgagggctggggcgagaagccgtttggctaatatccaattgtcattggcagctgtcaactggtaaccagggcgtgcaatcccaagcggatctatttcgttgagcggcaagaccgtaaacatgtcatgccatccagcctccaggctacccacatccctttcattgcgaatgattttgttgttgaaagtctcgagctggttatcttcaaagcagcccttgtagttctctgaactgcgtaaaagatgttttgtgatgacataagcctccgccgaaggatactcatcgcgaatccccgactcgcggcgttcaggctgattgatttccttaagcaatgttttgaactcagaaaaaccgacttttgacgcgatcaagcctgcaacatccttagcggatattttgacaatatccaaagcttcggttgcaatggcagggctaacgagccggtgagaagcaacttggtagatctggttcgagaaaaccatgttgaaacatgcaatcttgacgagcccgctcttgttgtattcgtcgctagtcagaaaggcagccagcgggtctctcacctggcagactagccccatcgctctggtgacaaactctgtacgatcaactgggtcggtgaaaaccagattttccgtgatgtatttgatcaacaatctgtataacctcgacgccacacctagagcagccgtaatgccagtctctggggaggtgacagcacttcgctcaacattatcgataatcacatcaaagacctgcccgatctctgatgatactgtatcgttccaacgactccattggaatgtctcgtctctgagctgaatggagaatgaagcggcatccccatcgaagtcccttcctgtgatttgcaacgaacgagaaaattccccgcttcctatgaatgtacttccatggaaaaatgtgttgtcacgtagggatggtactccgaagtcgaccggatagaagcgttgccagttgaaaagcccggcgacaccgaaagatggaggacgtacatctccaatgtgcgttatgataggaggttccaagtcatcggagactatggtagcaggatctggattctgacggaattcgtcggcatcgagattgattcgtttgggggggtgcttcttcaaccgccgtcgagatacagaggctttgggggttggcgtttgggttcttgcttcagccgaggcggtagcggcggcagcagcaacagaagcattcatgggcgaggaattgcctccagtactcaatgatccactgtcggagacatatcgatccaaagtcaagctgggcttgtaaggtttagatgtgcgctggtttttatagtgtcgattaagaagagacaatgactggttgaacatggcgggtaccattttctggcttctaccagggcctgccaaactagttgccgcaggcctaacggtgttcctcttcaaagatgttatgggcacattcctaggaataacccatgtgtgaccgtgctgctctagttttcgacgcgacgaggacacggccactggggtttggttcggtgggactgacactgcgctagattcgggtggtgcctgtacccgttcaggttccactgtgttggtgttcgaaacaccagtgtctgcctctgcatcgaggaattggttcggtatccggccgtttttagcattcgatttagctcgagcactgagaatcgaaagattcgttgtccaatgccggttttggggagctctggaacgtggcgggctaatcttggcttgccgaatagctccccttttccaatctcgcaaagactcatttgcatccactgtgtcctccctagaggccaatttcacgaacttctgagtagggctctgcctgcctccatctttacgtgagcgtggtcgtcttgtcgctaccctgagcagtcgcgattgctctttgcgaggcttcgtagcaacatctggcgcatccagtattcctattcttggtcgctggacggcagagggtttcttggtccttcgtgctccatacgaggcatcagtcattcgggtttgacgaggtctcttcggctgtctttccccattgggcaaactttgtttcgatttcggcctttttaaactgttccttttgtgccgagaacctgttgggttgcgcggaacagctgcagacatgtagtcgatgcggttatcctcggagatatcacccccttccagcgcgaagggatcttcgaggctaggagtgccagtcaacatctggctggattcattggctacagaggcatttcctagagcatcatttcgattgtcctcgtcgtccgaatcggaatctccaagatcaaacaagcctcttgcctgttgcgttgctggttgctttgagcgatcaccccttcgaatgagcttccgcgcaacaccctttccatccggtcgttgcgaagaagcatggcggtctaatttcaaggatttttcgttatcattcttctgattcagccgagcatgtgatgcagggagcgctccacggatcattcgttggaatcgtcgaatttcacgttcttcggcatctgacttggtttcttcttgatcactctggctgctggacgagatggactgtacttcctcctcgtcatctgtacccgcaccagctgattgaacctggccagcttcttgtatttcctgtgccccggactttgcaatttctcccggtggcgaccacccacgagggaaccgaaaccctccttctgaggcacgaggggttcttgaggtagacgataaacggcttgcgtgggggggactagacgacaagtcatagatggagacaccgttttgatttttagtaggtgtatttctgtccctaacaccacgaggtttggacggtttgtgtagattatgacgttctttgggagtcccggaatgagatgtcttctggcgctttgccaggcgagcttgcgatgaccgagtatgctctgagtcgtggtgttcccgtccttgcgtggcagattgtgggccacgatgccgttcatgtcttatcggcggaagatactcttccaagggaggacttgatgggagtgcatcgggatcatatgaatcttgcccttgactttcatcggtaacctgctgtctttcttgtggcggtcggccaaaaggcttgacgccccgcgcctgtagttgctgcgcaaatttgagctgttccagatgatatgggtgcatttggatggcattgcgctttcgaaatgttctttgcgcggcatgcggtaattctcgcaatacttcatcggggatatcaaggtgaggtaagacatcatcggggttggcatctagttcaacgagcactgcttgcggtagatctgcctccttatttatcggcgtttctgcttctacctccatcataccatctgcgtgtatctctgtggaatctttggccggcggagagccaaaggatgatggtagagaagataatggagagtcatcttccgaagcctcctgtggtggtagtggtggtggtagtggtggcgcctctattggttggacacgcttggccgcggtgtttttcttccgagttggctgaggggtcaacgccagctcgtcaggcgaggagctccgagtgcttggggtttcatcttgcgattgggacggccgtgtgggcttcaagggtttcggggtagactcgcggctcgagggcttcgattgaggcctgtcatgttcctgtgatgacgttgggaagtcgtatatgctggctgtattattcacggatgcattggtaatgtgcagctcgctgttacggtaattcgttgatttcgtagccgatgatcgaagtccgtaagtcttgcgcgctcttcttgggtttggtgtcttttcgtcatgcgcagcatttatgaggtggggacttgctcgattcgtgtgccgacgagcgacctcctctgtatctgagagtgtgatagagccattctcagcccgaacgtgctcgcgttgttccttcgtcacactcgtcgccccttccttcggtgacgatgaagggttgtcgatatattcgatattttcgaccacgggactattttcggcattgccattcttcgtatctaaagaatcgaagccgtcttcctcgtccgagtcagggacatatcctcgttgtcgccatgattccatttgcatcctcggcggggatcccccatatctctaaacagtcattgggcggtctcagggcgatgaaaacgtgagctaaataaacctcgggttaaaattcgcgaaacataaggaaacaaagcgtcgaaaatctattcaaactgtctgaatgcagggcgtttgatcctgacgcgtgccaacggagcaatttagcagacgcgccggctgctaatcagccaactgataaccgatcttttgcacctccgcaacctccgcaacttccccaactgcaaatctcgctggtctaccccaattcctccgaaatgagtcgcaatctcttccctgccattttcgctattggcgtgggggtcttcacaagtaattataccccacagcaagaatggtataagtcgctgaattgatccatctgctctaggctactatactttccaaccgacattccagcaacttcaatatgagagacagcagtctcagaagacctcgcctccgtctgatcctgttgctctgaagcaggacaccagtgccctcaccaaagctgactttcagcaagatcccaagtccactcaatgacgttaaccggccttccccttgaagtggcactgggctgatctgagtatctaattgggaagacagtcttccgcctcaggttgacctctcttacctctaccaccaggtaacctactccacttcatatatacctcaacattatgggagccaagtctactaagcaatgtgagtacatctcaatctcacattcctagtcaaaccaggattcaattttgatgatatactttcccaggccctgcacctcatcccactgccccagttgaatctcacgggtctttccacgataaatggtcagcttacgtccagagtcaagttgaccaaatttctctgaatttcgtcgtggtggaagcgaagagagagtcggcctttgctcaagggtttacccagtgcttggggtatatgggcgggtttgcatgctattaattagattagatgctatgaatctgactcattggaggcattggctttgtgcataggctttgtggaagagacaacaagcaagatttcactgtctatggcgacgatattgtcaaatggtagtctaacaacttagcttcttcatttgtaaacaagccatgcatctcgatgtctctgttacgtctcctggcagcttataggcccggaagctctattcaaagcttcctctttacgttcggttcaacatctaaacacctctcgtcgacacatcaacctccaggccacgcacctacaaacaatcaatcataggcatgattcattagatcataaatgccaacgagatgagatcattctagctattcctgtgcaggaagggaaagctttccgccgtcacgaattttgcccaatccttttagggcatcaaccgacgtctttcgaggtaagggcaaacaaaaaccagacgccggagtggaagaagtcgagtagttccatcaaacttcgataatacgtagttatttaactcgttagtatgattttcagcaggtatgtatatgatacatcgcagtgcatagcggccaaccactagggttttattgccaacataagattgtctattattgtagagatgcgatatgatttgctaggattagagcagccacggatcagcaagcagctgccttgcggtcatgcgctcttcgggtagccacttgagcatagacctaaggaaacggagaaacgatttcttttcacagtcggagagtcgcatttctagactttctagggagtcctgcggcacgaccgcgtcttcatgagcagtccaaatgcctgcgataattttagcacgagtcacatcctgttaattagaactgaatgctgagacggaggtctttaccattgcgatcaaaacactgccctgttgtttcactgcgctggataaaatcaggcggcggtggaccaatcaatgcgaccatcgacgcaagatgtttgaaggggtcatagttgccttcgtcatcgaaaatattcccaaatagatgtcgtccttcgaagagatcccaagtctaacctccattagcgggagtataagaaaggcttcaagcactactcgccaaggcacctatgttccaaatatcaacagcactccccaggtcatctcaaatatgatctctggggctctgtagatatcaggctgtacaaaaggccccgagttatgtgttttcccgatccttgcctctcctagatcacaaaggattggaagaccgaagcttttccctctcaacggtcggcggaattgtcgactttggtatatggtacgtgattcatctgtgctctttcgtgggatcgggtgcctgatctcttcatctgcaaaatcggccagcattgtagtctcctccaggctgagcattacattgtcggttttgagatctagttcacgttaggctagaattgattccctgtgttcgagaggagatgtaccagtgtgaataacattagcttcggtgtgtaaatagtcaagtgcgagtaataatcgcttaagcgtcattttgaggagaggtaggtcaaagggccttggatttagtctcatcatctccagaagtgtcatatgcatcggttgtaggacaagacaccggtgattgccagcatggccccgaagctcgaaggagtcatacatctcccgaagcatcgactgtcatgggtgtgataaattgatttttgcaaggtgctcgtaaacccgaaattcgcgatcggtcgcattagggagacctcaaagtgatgtagatacctttagtacgacatagctttggcttctgagctagtttagcggtaggttttcttaatctcgagtggtcacgtaccgaaaatcctgacatagccaactcgtggagtgggctccataaccaagcttgccggtgacccgatacctatcattgaatacctctccaatgtgtacggggtagaattgcctcgggtcatagtgaggaagcgtctcctcgtcgatgagggtttccactggcaaactgacgaaggaccttctagaggtgggttgaaaggatcgatatgctattctggaggcagatatgaaggcgttcagtcgtgaagtcaagcgtgaagtcatgcctgacgtgggtatagcaaggagacaggagagcgttcatggcaaatgacagctcgattgccgcccttcataagaccaggagcacgatgtctggtcacatgatcctctgctagctgcatatagccttgaccttgacactgtccccgtgagtgtactgcagtccataagtgtggatgccctggctcaggaggcattgcagcgctgacgatgcaatatcgccctgagcatgggatacgatgtgctctcagtgcgtgctcattaatatatgcacaaagtagtgttaatcccaagtgtcttatactaggccagagccctagttctcctagtctcctcgtcgctaaattggcggccataaggcattatggcattaggttagggcagatcgtaacgtcttaatagggctatagtatatagcatcaagaaactgaggaagtgcctctcgcctgttcccaatgcaatatgctttattggagatcggctcttccccacattccaagcctggcgcacgcggcgccatatgtttcgctgggctacagtcgttcaggtattgtggccgttgtacatataagactggcacaacggcccgtttcgaagtactggtagatagtactgtagtgaggctttccgactgattggatataaaagccagttttctcggcaaatccatgtgtatctggaaatatttgaaacaaccgatgtattgcatgacctttaaaccttgacatctggaagatacatgttttgagcgccgttcgcagcacacgcagaaaatcaaccctagtcccttgcaatgataatgtagtccattcccgaataccttaacagaaaatccccccataagcgccaatttattgtagtttctgcatgtaaatcaaacttcttcaaccattttccctgcaggaactgtaggtgcaccgaacacacgcccagtaggtgtccccagccattcttctggcacggccactttacagccatttgaaccgctgatccagcgcgccatggtagggtcggctttatcggcctccgcgccttcttggccgggggtgccatcggcggcctcggcagcagcagctcgaccacgccgcttaggggcctgcttctttagcagtcgatttattgtgtccatctgttgatcaaaattagcggccgttctccaatggatatctcgaaggactttttgcgcataccttctcctcttcgttccgcttctcacttaggttcttccttcgccgcgccatctctgcacgacgcatctggcgctcctcggcagtcaaatgcttcttgacctggggctctatttttttagttagcttcggtttggacaaatggttgatcgtagtttcccacccatgggaagttgcaagaaatcattccccagatttcctcgctggcgcttggtggttttgccactttgcatagcgagagcatcactatccatgtcatcctctattccatcatcatcgtcgagttcatctagatcatcaacgttgacgtctgggactgcactttcatcctgatcttcaccctcggcttcggcatcttcatccgtatcggagatgggctcttcctcgtcttcttcttcctcttcgtcttcgtcttcttccattttgatctccttggcctccacactcttgggcggcttggcgcgagagggaggggtgtttttaccgcgcctggtaggcgcctgaggctgcacgtcatccatatcgatgtcaccatcagcgtcagcatcagcatcgtcatcgtcatcgtcgtctccaggtgcatcttcatcatcaacttcgtcctcttcttggtcgtcgatttcttcttcgtcgcttgtagcaacttctacaatcttctttcggttccgactggagcggggtcccgagacaataggatcatcccgaaacacattgactgagcgccgtccagcagagcggccagcacccgtagcttcccgcaatttgctagaggccattttgagagtaagccggagagatctctttcgatcccctgaattcaatgaagatcgagagatggaaactagagcagacgcggaaacagatgcgcgagtttgtctggtagacctggtggccatgttagcctctggctctggggattcatcatgtgcctttcgcgatcgaagggatcgacggggcgacatggtggcggttttatcgagtgtgacagaagtcgttgggaagggaaaaatgcaaaaagcagaacagcaaaaggaagcgggagaaggagggtaagtgtgtggcagtaggaacttaagccattaagcctttggcgagaggggaaggtctggagagagaaagagggagagagagggaaggagggatgtccaatcacttcatccactgagtgagacgcggagttgcaaaccgggaagatacagattgcttttctatacgggatgtttccactgcgaacaaagcgccgttacagggaatcaggcttggggttgtttctcctggcttctcttgggggcgtgtttgggggctaaccccgggcttgggcagatcggaaggcacacaaaaacaacaagatcaacgggggaaaacgccatactcacaagtacttttctctaaggtttcagattctccagatgtccagtcgctgacgctggatgaacgaatgaagtactgcacggtccattctgccgggcggtatcgagtatatacggatgccattatggaggattgtggtgatctttcggtattcaattgatctcgctagatataatgtataaggacttattgtagaagacactatagccgtcaatagaacccgaaagtcaggtggtatggcttcgtctcacatacaggctattttcggtgaacaaggtactttggatattcacatctagcgccctaaatacatttaaaatacaatatttgccattcatattagattattcttcaatatcatattctagtacaacgtgaacaattatcaatgtgatctcaagatgtacatgtagttatggcaaatatcaatgcctgaggtgtactcggccttggaacagccgaggtcgggctcacatggcaagtccggggaaggttccgtctcctctttacaacaccaacgcctttgctttctcatatctctggcaaatgtgtcagatacctcatcatgcctgacgacacatctaaaacagcatctattccctcatggcagaggcccaataagacggccgaggagtcgccatcgccgacctccgacgatgcgcccgcaactacagccacacctcgacaaactctcctagaccaagcatccaaatttctagaagacgagtcaatccgcgatgcaccaacagagcgcaaaatctcattcctcgagtcgaaaggcttgagctcagacgatatcgagcaggtcctcggcgtctcccgcaatgcagagacgagcagcagttcaaccgcacccaaggacaagacaccggaagagacaccatctgcctcgcccactcaatctgaagctaccccttctcctcctagcacctcctcgccaccctccaacaccatgcctcaatcgcgcccagcaccagcgccaacccccgcctcccgcgacgtccccccaataatcacctaccccgaattcctcttcgagtcatccaagccgccgccactcgtgacaatgcgtagcctcctgtacacactatacggcgccgcaggcctaggagcaaccctctacggcgcaagcgagtacctcgtgaaaccaatgctagcgagcctaacaagcgcacggcacgagctcgccagcacagcagaagcgaatctgcaaaagctaaacgacaagctagagaagacagtatccgtgatcccggcggagttaacggcgcgcaagagcaaggcctacagcgacgaagaagacgacgcctcgtccatcacctcggacccaaccgagctgttccacagggacgtcgcaacacagacgagtccagagccaactccagtacccagcactactggcccggtggactcggcacccatctccccatctacggcggtcaataaccacgtcagccgcgttgagtctattacctcgaagctgcgcgagatcatcgactcggagaagggggcgagtacgctggatgactcgatgagtacacgtctcgcggatctgcatcgttattgtgacgggttgatttacagtgctcctgcgtactcttctgggtcgacgtacggggtttggaataccaataactcgggctcgagtgaaagcgctggtctgcggaagggggaggacgaggctattgctgggttcagggctgatattcgcggtgtgaagggtgccttgttgagtgcgcgtaacttccctactagtcggggtggacgtcttcccatcggtggacggtgatggggcatcgtggggttttggtgcgactgtacgaatgtacgaatgtatatagattgcaacggattttctaagtggtttacttaggtatacctaggtttatacagtctgtatcttcattcatttgattgcatctactagattataacgagggtgctaggatatatattatcatgatctgtaatgcgaaagccatatcctcatttgattcatgtctatctagcagtctgtgtcagaaggtaccatatagcgaaataaccgaccatactcaagaaacgtcggaaatatttcgctttgctcatgatcagacttatgccgcaggggagaagaggaacggaggaaaatacgcaagacattaatataaaatggacaaggaagatgagaaaatttcaagcaacgctgaagtatagagaaaaaaggccagaaatacataagttataccgcctttaacattccctcaacttgacaagaatcaaatgtgtcatttacggagtagcgccgctcatactaatcagtcgcttcacaccgacctgttgttatacttgttagtgaccgaccgtttagtatcctaggaccaaagttcactcaccatccaattgccacattcgtcagtccggttggtcatgatatcaacatgaatagcgagggcggtattgtaatcacgttgctggagtgcacgggccaagttggccatgtcctcgatggtgttcggcttgagcaagtcctcgttgttgaggtgatcaaagaggatgttcaagcggcgctcggcatcatcaacctgtaccttgaatgccgcgggggcccggctcttgacgcgctgcatgtctgctgatagaatctcgaagacaggctgtgcgtttgcaggaatatgtgaacggtcaccgggggctggaataagggtcaattggctggaagtaattgtttgttaagtggtattactcacgatactttggagccgccggagttggcctctgcgactgggctgttggaggtcgaggtacttgagacggcggcgggatgccctgggccataggtggaggctgtgtagcaataggcgtggtgggtccgtatgggtttgccgcggggggttgtgagaccgcttgtggggcgtatggtgaggcaacggcctggggagggggagccaccgggccacgagtgtgcagttgcgggtttgcagcctgggcagctgggctcggtgcataccgattggttgggggtggtatactaggaggagcattgtagggcgacgctccgcgggggatggatgccgagggacccatggttgacccctgagccaacgacggtgactgagggagagaagcgtatggattggcagggggcggcggggaacgcccagggacctgcccaccggatagcggcgacatcatacgcggtggaggcaccgaacccgcctttggtgggggaggcacggatggtgcgcgcggagcaccaaccgggggaggtccctggaccaggttcggtgactggttggggaaaggagaggcgatgggtgcagaggctgcggcaggagttgaacggcgaggtgcaggagccttcgcaaagccttctggcaaatcattccatgcaggaaggccagtggccgtggtgtatgttgtgattgtgttggctggcgactggttagatgacgcacgaggaggtggaggaacaccagcacccgtgggctgttgtccgccgaatgcagatggtggagtataactggtaggtctcatgccttgagttggctgatacccagttgtcgatccgtaggcgcctcccgtcgacatagcagcgtaggggttgctgggctgagctaccgaggtcgttggagggccatatgggttagcctgctgggaaacagcgggcgcagtaggcgtataaatgttaggagcagcaaccggtgttgaagtagcagcaggattgtaagcctgctgcggctggtataaactgggctgttgcgggaggggcttgaaggcaggtttggctccgacagaggcttgggccttctggggtgcctgtctggtggcaagcttgatgcggttgcgcgccacctcagcttcagggtgcttttcagggacaaggtcaaggtacttctgagcaatttgcaaacgtccatgggtagcgacaacatcggcatattcaatgtacttgtcatacaagacactcaagcgccaatccgagtccttgttccgctctgtatcctggaacttggtgacttggcggaagatggtaactttctcgatcagaccctgtagagcacggacatggatagagaaggaagagttgtcggtgttgctttcaattcctttctgctcattctcgcgaagctcctcgacccaaatgttaacaaccttctcaagcttcgagcctgctaaaaagcagaaagaagcatccttgcgggcgctcttatcgtcgctgttctggacctgctcctctaggcggtcaccaagagcatcacagagatcagggaattccttctcgtcggcgaaggtacacaaggcagccataacttccttccagttggacaaatcggcattatgcaccacatcccacaggttcttaccgacaatagatgcgagcaagcgcatatagttcggaccgccggcctgcttagagaagtagtactcctgtgccttttcaatgcattttgggccgccgcaaatagcaatcatgaaagcatcggacatcttatcctcccggagggcaacgtccagagctttctcaaactctccaaggagcaaagcccgagtaatttgcttttcagcctggctttctgaaccattgaaaatttggaatgggttgttggtttgagcacccttagaagcagccagttcagaaaggaagctgtcaccttcgggattgggatcgaacatggattgcaaacgcttgtgcttcttaaccttagccggtttggcggcggcaccgttagtgtcctcgccttccttcttgtccaagccaagctgcgcgagactatcggcggcctcatcagcctgatcctgaaatcccaggtactccatcaagtccttacgtgggttttcggaaattaaagcctccatcaccttccagtctgctttttctgcttcgttggaagcacctgaagcgcgcgactcacagagagtacgaatatcgccctctttcaacgcagtctcaaagctttcagtagcattgccaacgctctcatcaacctcgaacgatgtgattttgacagtagatgtacgtgagcccttctcagtcagaccgaaggaaacgacccgacctccgaagccaaatgtagcaccacagggccgctcaagccagcgaggggcctttgggagagagaacttggagacctggggctgcgtttgcgccttattaaagaagtcttcgccgtccaaggcttgattgtgatcggcgatggcctgggaattatcggtcttcgtgttctgcagggtctggatacaaatcttgccatcaaaggacgcggttgcgaagaagttcgggttgtgggggttccagcgggtctggaaggtccagttcgtgacaacggggaactctccgtatgcttcaccggtttgcgggttccaacagatattacggttatctttgccgcaagacagcaggagatctggatcatgctcgcaccaagaaagcgagagcacaccggattcgtggccggtgagtgtctatacaaataatatcagtattaagtcacatctgggctctgatagagtaacctacccgctccggggcgtgggagttgcgcagatcccagacatagagcactgggtctgactccagcggtgacgatgtaataagctttgtgggctagacgtgaaaacggtcagcaatcctggaataactacgtgggaagtgctaacgtaccctctcggggtcccatgcgactgcgctgacagccttccgggccttgttgttcagtgtcagactctcttttttcgtcttgacatcccagaccgtcacgaagccggagctgctaccagtgacaagaatgtgaggaaccttcctgttccaatccaagcagtcgatatcatctgtgcgggccgcgttgttgcccaaccggaatgggttctcgatgttgtttagatcccagatgaacagctatccagcaattagccacatattcaacctatcctcaaaccgcagcctacctctccctttgcgccaccggttgccagaaggttcgggtgtttcgggttgaactgaagggtcttgatggcgccgctgtgcttagtggttcttgagatcaacgcatcactgaaattgaacgattagcaaatgtcaccgggatctggttcgtatgtagagttcgaccaacctggatccagcaagtagcttatcagcatcccacaactccagggagccattctccaagccacccgcaatcacaccccgtttgttgtcttcggacgttgtccaggccacatcattgaagctagttacattaatcggtcagcatgctcatctccattcaagttcctaaaagcacgcttacccagactctgtatcgagcttagctatgggctgcagctcctcgctcgcatcttcacggtcaaggcccaaatcccacagttcgaggcatgtcttgttagagaagtcggcatcgacagcgccagcgcgagttccagttgcgatcaatggcgacgcagcgccaggcgaccaggcgaacgtggccgtccttgggatttccctcagacgcaccatgatgatggcaggggaggtatgttttggtgaggatcgagaccaatggagtatgtgaaaggtatcacccgaggaatagtgaaacccaaataaatagaaagaagagggatcaagaaccaccccttatgaataattgacaatggggtgatactctagatgttccaagtatagcagtaaccaagtggcctcctggacttggagggaccggggaacgcgcgctagaccgcttttagactcgccaaaacacctggcacttctccgaggtgagctgcacgtgatatcaatctttcggtctggtttgatagcaacgtacagcttggtttcagagtcttgaacaaaagttttttttgccgttgaactccctttcccctcacatcttctactatccgtgcaatctcggcacatagccgcccaaatcaaagatcccccaatttgacccgaaccgcaactacacataatgagcgaaaccacgcggctcaagagcaccgtctacgtgggaggtcttgaccaaggggtgaccacgctcacacttgcggaggcttttgttccatttggtgaagttgttgatatctcgctgcccaaaccggaccaacccaactcggccgaagttcaccgcggatttggatatgtggaatttgatctgccgcaggacgctaaagaggcaatcgacaatatggatggtagtgagatctacgggcgtacgatcaaagtcgccgctgcaaagccacagaaggatgccaacgaaggactaggcagcaagactgcgatttgggagcaggttcgttgggatcgatttcatatctaactgtaacctatactaaccgatgcattctgtaggagggttatttggccaagcatgccgtcagcgaggaggatcgggaagcggcggaggaggctcaggctgcaagcagtcgtccgcaagatcctatgcagggattggaacaattagatgttgctgggccaaagcccgagtgatgcacgctacactttacgatagctacgacgaagatgacaaacaaaaagcataagtcctaatttgccaattacaccatcaggattcaggctcggacagccggaatatgtacacgggctgcaatttcgagcccattccatttcttctccattggtctttctcaaatcatgcccatcggcttcaaattctcctagttcaacaatacaagcggcaataatccaaaaactgcgcgtcgcattctgagagctcaaagaaacatggtggtacatttagtagtcacggctctcggggctgttgcggtggagacgcagggtcttgtcggtcagcagcttcttggtgcaagagtagacagcagcgccaagggcgacactaagattgcaagttagcatcagggaaagacatgtggttggttgccagtaaagcgatatagcgtgataaaattccggcatgcgtcgggcatgttttcccggaatcaagcggaagatagtatcaaagagggagaaacatacgcgaggacgaagcctaacaaacagaccgttagcctaatttccgaccgcaaaatcatgactatagcacataccaatagggagcaactcggggggcacacgcttgagctggcgcagacgctgggagatagtgtgggctgtaggtgaattgttagttcaatggcagtccccataaaagtaagtccattttatatggctccgtcaatcaccatataggtctagtgatctcagagatacataccactctggggctccttctacagacataagttagtaaccgagggatcgtatgatcacaacaccattttcgagggaaagaacatacaggagtagggaaagcaaaggcccgagtgggctgcatccgcagcatgcgagtgggatacatagcgagatatgtgattcaacctggagtagcagacgaagagtgggatagaggacgaggttggaacgccagcttccgagaacgtgactggctcgggtgtaaaagcgagacgctcagtggctctcgcttgaccgcccgcggtcatatccggcacttcacagcttcaatcacccaacgtcgctcttcccggctcactttctcccctcctctgtttccactccactccaattctttttcacgtgtgtcgtttctctcgaagctacacatcgcaaatatgggtgctattccggaagccgaccccgatgaggtcctcgagacaaagcccttcaagttcgtcactggtaagtccactaccccctcccgagaaaaccggggcctggagccctacggagagtcaatggctaatttaattgtagctggtgcgtaaaccttgatattttccctcgtctttcgctcgtcgcatgcgcgtggaccgattttgcccgatcggctgatgtatggtgtaattgacaattttcgattggatcgcaggttacgatgctcgtttcccccagatgaaccagtacgtgataagcttttgttttggtacctttttttatttatctaacttggattcacttcacaggaccaagcactgctggcagaactatgtcgactactacaagtgtaccactgccaagggcgaggacttccgtccctgcaagcaggtaacttcgacaccgacaatattctcaaatctcagcagcttctaacggcttctctctcagttctaccactccttccgctctctttgccccaaggcctggaccgatcgttgggacggtcagcgcggtacgcatctagaagtctcctcttgatatatgcttattcatactaacttgtactaacagaggctggcaacttccctgtccaccttgacaagtagataaccaacagctgtttttggttggccaagtgagccgtgtcaaattttatgtatcgacaagttccaatgtactctactgggtcacgcggggacacaacccctatatttcctaagtcgttccatccgtataaggcagagagaaagttcataaactagtcgtattgtaaaatcatttgtgttgtagttagctgatgcttgttctgacctttgaagcgtgagcagtcgcaacatatctttcatgtagacgctcgcagtcattgctagctgggaagataacttagaattgagtacaatccacgcgtccttgcggaagtgcgttgaatgcgattcagtgtgtatgtatctaattctatgtaatcccagttccgacaagaaataatacatcatccagcacactgtacaaggccatggggccatgtaatagatatgccccaaggccgtctccggccgttagtcgaatctctgatgaaagaaaacccgaaagaatgcaagctatatacacgccaaattgaaaatggtgtgagtcagtctcaaggtgcaacacatagaaaaccagagagatgacaacaaatcgtatataccgaggatatatcggacagaggcgtagatgccgctgtaagattgggaagattcggcagggaaaaaagtacaaaaaggaatggtcactctttgtatctttaaatgcccttcagcttgcggtagagcttcttatgctcttcgaggaagaggaaagtggcaattgtatggggaccaagacggatgaagctaggcacccagccacggaaagtccatcctaggccttccttacggcagatatcacgcaggagaccaacgatagtatgaccaccgctatccgcatgagaagccgtcataatacgagtcttgatcacgtccacggggctgcaggcagtggtagcaacgaagcccgccatgaacgaggctgtgaagtgtgtgcctagattatcagccatgccggctttctccatacaaagacccttgaaggtgtcgtaagtagctagctgcgaggtagtcataaggatcgcgcgggttgagttaggccatactccgcggaagagagaaccaaatccctctgtccgggtcatctggatgagcccatggattgcgtttcggtagtttcgtcgctgggcgggagggagggacgcgtcgtgttgcatgcgcacattcatcacatcggccgggttgcctgctatgccaccgatgaatccggaagcagaggcaatgccgatgagagtaagcaggcctggtgcggcggctgggtctgaggtgggcgggctaatgcgtgacttcaattcttcgtagataccgaaacgcgtcgtggagtatgtgatctgacgcagcatcgcggctgacaactataccatatcccatccgtccttcgttagccaactgtgcccgtttactgtcatcgaccggattctagggtcgcacatacaccactatataaccccgtgacgccattgtgcttcagaatgtgcacaaacgtcccaaccatattctttggcccatcgggcgcacgagtctgtaaccggacctattgcgcaagaaacaaatatcagtgtcggggcttggaatcggggccacgggccattctctcggacaaccggctaggagctcctaaataccttaactaagggcgtagagttagcagatagtttataatcgagggagaaataagagcatacctaaatccaaggggtgcgttacggccgccgcgaaacaggaggccgaacctccaaaccaaaacgggtaatgcacctgcttcggctttgactgcgcgggctgaacgggcacgactcgggagtgaggaggaacctccaacatcttgccgctgtctgccatcttgctaggaaacaagacccctaaattatacacgcacaaaaaaaggcggggagagagtgattcaaggggatatgtgatttattttttttactggtcttttctcggcttttacgaacgtgacttgacgtaaatttttggccctttaaataccgacggagacaaatcagacctccgaaaccactcggccagtcgccgaacgtgaaaggcagccaatcagatcaagcgttttgataggggctcatcgcttgcaccaatcaccttctcgggtttgcgccgaacaatatcttgtatggaacatacagtccctcaggcaccctggatatcgtccttgttcggtcgttgaaatggatgccgagggtatcttaatccataccgccgtcgtgctaattgcttcaacagagctgttatgacgagatcggctatcatgcggatcttcggagtttttacggatgttgggcggttggcactggcgtcggactaccgagtggttctacaggacaactttccgatgcatgaaggctaactagacgggattatggttgtgatgtgatcagggtatagaaggtataaaatatctacttcagtttaatacgttgtttcgcagctgtctcggcgagggtattcgtatttagtcgttgtcgcacaggaaagaaaagccaagagctgggataggatgtattatcagttaaactacttgcttttgttcggagccaagtaaatacagtagaagaggtgtataacttataaagcaatgcaaactgcatagtacatactccgtagatacatagacaaccttcaatttagacgtgtgaaggttaaaatggctcggactaccagctgtagcaactgtaaataaatccaaatacgcttaaatcataagcctcttctcctagaaagaggtaaataaatgctgcgttgacataactcgttgtccagactcaacaaatacacttcgggaactaattttgccggcccgaacatgtgttgatagtgttgatagacaaccttggaattctcacaacgtccagctcaaccatgaggctatttgctaccggtcgagccctgcgtgcgagcagtggccgttggtcaattgcctcaatccgaccccaaaccgccattccccgctcgctcccactgactcccattctctcccgcaaccgcgaatggagctcaaccgccgctcgccggagtgaacaaaaagcaaccgctacctctaaaccaccccagcaacaatcgagcctcaaaatcgaaggggagacctacccaaccgaccagtggaccaacacccccgatacaatcctatcccatatcggacgacgactctatctcgacgagaaccaccctctcgccattacacgcaagctcatcgaaagccaattcgcagccccaagctatggcaactactcagagaagaaccccgtcgtctcaacaagacaaaacttcgacgtcctcggcttccccgcagatcacccgggccgcagtcgcacagatacctactacgtgaacgacaagacggtgttgcgcacgcacacaagcgcccaccaacaggcctacttccagcaaatcgcccgcaacgagcacacccgcccagaggaggtcggatacaccgtgatcgccgacgtctaccgtcgcgacgcgatcgaccgcagccactaccccgtcttccaccagatggaaggtgcgatgctgtggaagcggcccgcgacgaaccccctcgccgcctcggccgaaacagcagcgaggatcatggccgatgtggagaagatcccgcgccacgatgtcgtggttgaggacccgaacccgactatccacgcgcagcggaacccgttgcaggacgaacaccacagcgccgaggaggtcgaggctgtggctgcgcacctcaagcgctccctcgagcggatggtcattaaggtcttcacggaagcgagcaaggccgctgcggcgagtagcggtggtgcggagcaggagccgctcaaggtgcgctgggtcgaggcttacttcccgttcaccagcccgtcctgggaactggaggtgttctggcaaggggactggctggagatcctaggctgcggcattatcaagcaggatctgttgatcaattcagacgtgccggaccggattggatgggcgtttggactgggcattgagcgcattgctatgcttcttttcaatatccctgatattcggttgttctggtcacgggatgagcgattcttgtcgcagttccgcgctggccatatcgcacgcttcgagcctttctctaagcacccggcttgctacaaggatgttgctttctggttgcctcctgcggctgtgacgggtggtaacagtgctgctggtggagctgtacctttccatgagaatgatgttatggagattgttcgtgggattggtggggatcttgttgaggatgttactctcattgatgagtttacgcatcctaagacctcgcgcaagagcatgtgctaccgcattaactatcggagcttggagcggactctcacgaatgaggggagtaacgaaatgcatctgaaggtccgggagaagttagttggggagcttggagttgagctgaggtgagtttggagattgttgggctatactttgtactatactgtgattattatggagaacatgtaacatatagcattcctctcattgaaaaaatcgatatatggataccactcaagttctaataggtacagactatagctagctttgtctttgattagggtctaatttagggtaccgaaggtggaaggataatgaagacactagaggttatgacaatgcctctaagaagtgtgtattatacagtgaggaggagagaattatcaggggacgtagagctgcagacgtcacgaaacaagtgagaagacaccaccaacatgagacattccgtacgcctccagacacatgcaacaagggcgtatcatacagccgagtcaaagagacgagcagaagatagtaaggaatagtaattttcctgggtccaaaagccagccgtatccgagtataaaaccctatcgtgatcatgatgtatgacatatggtacaaagagaaggaaagaagagtgaaaaggcaggaaggtcgaaggattaagaatcgaagttattgccaacgatttaagcgttcttgacgacaccgaccttggcagcctgtaagagaaaagaaagcagttagtcaaaatattccgcaagaactttggatcttaggggctagcactcacccgcagaacgcggccgttaagacggaagcccttgctctgtacgtgcataacatcaccatcctcaagatcagcagccggagccatgaaggtagcctcgtgcaagtttgcgtcgaacttctgggccttgccgtcgaccttctcgccggggtcgaagcgctcgaggccgtgcttctggagggtgttcaggaggatttgctgggtcatgttgagaccggcgacgagatcgaggaggtccttgttctcttcgttcttagcagcgctgatcttctcttcgggcacagctagcagcgcgcggtcgaagttgtcgatgctatcaagaaggtctttggcgaaaccctggatggcgaacttgcgggcggcgtccatgtcgcgcttgttgcgctcaacaaggttgcgggattccgcgacggagcggagccatttgtcctaagaggaagttttggttaatattcatccgcgaaagagttgcggagctacccgtagcagtaagtatggggaaatagcttaccttgaattcaatggcttcctttgtcttctgttcgagctccttcttgatgggatcctcggcctctgcgttctctgcactctcagacttctcggctttctctttcgcagcttcggtagcttccttggtctctgttgaatagagacgggtagaccgggggacgaatggccggatagccgggatacgcggttgttgtgtagtccgtcgcagcgccagcgatgcggtggagggggaagaggtagagaggatggagcgcgcggcctgagcctgtctgaggagggttcgttggaacattataaatgatgatgtgtggaattgagaatagagactcggtgaatttgaagcggaaccatttgtcctcggacaaatttgatcgggaatcacctgaccttggcaaggaaaaacgctgggccgaggggatcttcttttgacttctctacggagtagagctattacgtatccctaagcttgggaagtaccttatgtattgacttgcaaatatcgcccagtgggctatttgcacctaccccgagcatacgaaggatgtatactttattgatcgcctgggcatgatagtccgttctacttttgaagcatgatcattgtgacatgtcgctcattgggttatttcgaaaacgtattaagctatgaaagacattcctggaaaagttcgaaatgattctcaacagctcttctgggatcagacgttcggttcattttccgcatgggacttaagaattcgcgtgatggcacggccttcctctcgatgctctctcacgctatagtccaacccgtaggcgagtacaattccccattcagacatgaatctcttcgtcaaccaacggttttcggcccatgtaagtggctctacgccggaggctcgcatcagaccggaggccatcaaggcttcaaatctctgccgctcatgctgggaccagaaggcgtgaatcatgtagcgcccgttagagcacaagggcgaaatcccgaactcatggccgagtggaggcgcgccaagttggacttggtacagcatggggccttcacccataggcttaaagtaggccgcaatgcgaccattggtgttctttaatataaaaccggagctatctggggcactggagtcgcatatgatagtgtagtcgtcttcgatgggccttccgatgatgttgcagagcattgctggggtatggagaacgttcttcaagcagatggagctatgcgaatccagatcggtctgggttggcaagctcgtggtggtgagattgacagttcccatcccaatgacttcgaccatgcctccagctatatccgtgacataagacctgaaggggatgtagtctgtaccgaaccaacagcgatctttggcagtactggcctagttagatggatggatttggccctgcgaggcagaaaatactcactgcgtgtctgagttgttggaatagacccaggagggacatggaggaggcggtctgtcaggcctcacaggcatcgatgccatggcgaagcaattattcgaagacaagcccgaggaattggaaatgacgttgagaagttcagttgcgattctagcaaatccagatacagagagatccgtattctgtcttcgccagatgaagtggaatagggaaggagcgagatgagagggaaccagataggaaggaaagaaggaacgaggaagcagcccgaatgggtctgtttgtttgtcgtgcacaatcgcttgcccgggaagtcactgtatcctcagacctcaactatcttctccatggctgcattacaagtggacaatattcactgccgttagggaccaaggatttctcccttatagacagactcggcattctacactgtctcccagacgtgaacatgaacaatggccaatcccatgaagtgatcataatatgcgtaagctatcacttatcatatgaatgaacaagcctgatgatgctagttccgtcggccagaatatgtttctcttcctcgagtttatagcctctccatcgtgggagtaacactgtccagatataccagtagagaaccccagagagcatactgtgtttgttagcgaggtaaatcacacatagaagtattgccactcacattccaatcccgacaagtggataggttgcatagaagagatcgaggtcgcgccaattcggcggagggacgaatggtgctactagcaggactaaacacaccacaacccgtaaccagacagccggcaaccacgctttgaagggccgtggaagatcaggctcccggtatcttactataagcagaccgactgtaatagccaaggcaaacatctgtccaggatatccctccaaatccaggataaagttatagacgtccccttgtggtggcagggcaagaaccagcatagaagggatatagtgtacaataagtccccccagtggagtcccaaatggccgcgaagacgatagaatgttttgccatggaagaaagccttgtcgggctatctcttgattcacacgcgcctatcaatgttagcatgtattggctttctatgcaatatatccaaacgtaccaagccaaaggtcaccaccatcacattcccggcagctgaaatggcaatagcaagtggaaagaatatttttccaacctgatccccaaataatctctggaatagcagtgcacccactaattctccgctattcttgatctcttcgagcggaatgacgaggaagtatgaaagattcgcaagaaagtataggcccccagccgtgaccagtgcagtgggacacacggtcttcactatattcaccgggtcatgaacttcactgaggacattattcacgttgctcaagccagcataggaatagtagactttgaacaaagccgacgagagcagactccagctccagttcgatccttcccacaacgaatcccaagaaaacggaccaactctctctacaggcgataagttatcagtatctccatgcaaaccgagaaaaaccacccagactcccgtcaaggacatcgcgccgatgaggaagatcttcacccagccaagcacattctggacaaagatgccagttttcaagaaacaaccatggacaatagtaatggcagtcaagaggccaacagcgagtgccttgtgctggatttcggtaggctcaatactcagcgcgaagaacgcgtatttcgagaagataatgcagttgctcgccgtgaaccccaggagcactacctgagctgttataaggcttgacgcgagaaagcgcggtcggggataggtatactcgaggtacacctgcacggaaatgagattagtttagccgacttgtttctgctaatcctgctgcaatgtcttttaccttttgtcctcccgagcgaggtagcatgcatccgaattccataaagacggctaggccgcaagctgataatatcgtcccaaccagccatactagcaaggtcaatccaatacttccagcggatctgacgattgagcctggtgttgcgaagatcccgctcccaatcacttgcgaaacgactagtatgtatgcgcttgaccagttgatgctctttctgtagtgcgtccctggtagagtatcgggatatagtgaggggaaatcatcggttaaaaggtcgagtggttcttgttgagagctgtcagatataatgttggattgacttgatgagtttaaaagaggctgtctctcctggatatccatggtgagctgttgcagatggagtacgttgtatagtttgaacaactatttgattatgctgattacacggaggaaatcattctagaccatgaattaattcagcccagaggagagtcgaggagataagatgttttgggtgcttggaaatcatcggattagctggcacgtcattcaggccgactgttgtgtgtatcggattcttgcaggtggtttacgccataggaatgtgatcgcacaactcacattaataattaagaggaggtatgtaactggcctatcatactttggctttgaaatcaatgttaaactatgaccgaatactccagtactttattcgaggtggagataatgacccgtactgggataggactatatatagcagggttattcagagataaccacaaaagatcaaagaggaatattcagcccagtataaagtgtagtcatttaaattccaaacccgaatatatccctactcatagagtccaattatccaaccatcagagtacatatcggctgtttctgaattagtatcagcagaccaacaaacgtgtagatgagaactcacaatgtcaaattctccctgtcagtcaaatccaactgactattatccactacgcgagcgactttacccccatccgaatcaaccgtctcgacaaccccattgctagcgacctgattaaactccgcgagcttgtcgcgacgtttgttctctcggcttaggtagatccggagcgcgataataattatcgaaggaagaatcgcagcaacctggagagctatcagtcaaatattccgcacatagctttgtccaaacacgacttaccacaagcaaaataatccaagttggtctgtaccgaggcttgaatggttgttagtatgacagtccaagccagctcgaatgaagaactcaccttccattccggccggaataattgcggagagatgatatttcccagtccgtatccaatatgataaagcgcaatgacggtagttttcttcgtatgacccgcggacgcattggcggcccagatcatcacaacagcatatgggataccggttgtagatctaatccagattccgacgatgagaccccatcgattggaccagggcaaggctgtcggaccaattagtagtggaccacattttgaaaagaagagacctactaacctagcagaaggatacttgaaagagcacctggaatgtatgcaatgagtgatatccatgctcggcagttctgcaagtttcagtccacgttcgcattagatgaccgagtctggcttaccttggtgtgatacaaagtgattgcagctgatatgagagaaaagaacgacaccacacccgtgacggttcctaatagtgttgtttgaagaacggtgaaaccaaatgatttgatgatcagggaatattgattcgtgactccgtttgccatttcctgggaccaggcgtgtaggaagaagagccaggttttggggtcttgaattgcttcaataaacctagagctttagttagatattgaatatcaagatttcttaggtatggggtctgactggtatcttttgaaaaccttttgctcgattccggagtggttctctttgatccgtaaaatagccttcgcacgttcctcgtgtgttaggaaattagcatggataggactgtcgggaaagaagaaatagacaaagacaccgaaaatgaccgtaagaataccagtgatcactagaatagaggttagcaatctgacggatatactcggggaacaaccatacccatgaaccatttccacggagaaaagctgcccgtatcaatccaaagaacaccataagatagcaatcctgacgtgataggacttgcattaccaattgaccacataaccggcatcatgacggcctgctcgccataagtaaagtacatggacatggaaagcaggaatgctggaacgatgcatgcttctgctaccccaaggaagaagcgaacaacaaaaagagatgcaaagctgttgcaaggaatatgcaagagagtgattccacccctatagagccagtcagtgaccgatataccattgtttgaggacaagagaagaacttaccatattatcaaattgccagccagccacttcccaacaggaaaccgctgcaaggcccaattctgcggccattcagccagaagatacccgaaatagaaaattgaagagagccagttgtattgattcgagtttagatgcgcatcttgcatgatccctaggatcgcagaacttccaagctgctagcatgttattactggattctcctattcggggatcaaattaacataccgtttgcttatcgacatacatcaagtgatatccaatgcagagaaagggtaaaacccgccataagcatttgttgcgaatctgtattgcttcttcgggagtcggatctgtgacctgaattttcgagaacagcttaaaactctcatcggcaaattgatcagggagctttggggtgttattgaaatcattgtcactttcttcattggcttgtgtttctgccacgaagccaggtttatggtcttctactgccatcgtgtgaggtataaacaacgaagaatatgaacccgcgtaaaaggctcaattaaatgcataatggcagccctgctcatgtacttatgatagtaattagcctatagataaaattgcgcaatgttcctaagctccgtcgtcttcacactaatgagagattcgcaccagataagaggaaggagactgcgggctcaccacagtcttctcctaatctggaaggtcgtgcactatatcttacttggcagaagagtgcttgattaatcaaaacgcgatgttcatctatacaaacgcgagtttgactccaaagcacgtctaaagtcgccattgcggggttgcgtcagcgctgcattgttggcgtgcttaaaagctccgaagtcatggccgcgatagaccggaactataaaatttttttaccagaagtaactttttatcgaactgatccctgccgaatcgacgaatatccaattatatcaatatgacagaaaaaaaggaacctattcgcgtcttgattgccggcgcaggcatcgcaggtctggccacggctatatcgctaacacgcgtatcaaccgttccgaacttggatatccagctatatgaacaggctccagagctcctggaaataggagctagcatcgcactcagtccaaatgtaggtatctcgcgcattctcttgaaatgattaaagcacctaaccgtgatgaaatatcagggcatgcgcacactggagaaactcggcgtacacaatgccctaacagacgaagttgggtttagaggcccaagtggaatcccacaaatattccggtgtggatctatcacatagactcgagttgtactactcagcatgctgattgataaatagccactggaaaacgaaccaagtcgtgtctacagacacccacactaacgtccccgatccccgtcaccataccacccgcttccaccgcggccatgtgcactctgctctgctcgagcatgtccccaaagagtcaatccacttgggcaagaaaattgcgtgcgcagaagccaatcaggatggtgtttcgttgtatttcgaggacgggagtagtgcccacggagatatcctcatcggggcagatgggattcgatcggtttgtgatatagcttggttagcattgtgctttgctaactcctgttcagagtgtcagacaatcgttcatcccggattataagctacggttcagtgggaaggtattcatgagggcgacatttgatgcctcgttggtagagggcaagatccctgatttgcctgctgattcgatgcattgggtatgttatcgctacattagggagctttaaaatcgtcgctaacaaactgtcagtggggtcctaaagacaacttctttgcgtctcgtcttggtaagtgaaaaagaaccagcatttcacggctgcatagatctgacaaaaccaggcaaggaccagtacaccaccgttggtgcatacgatgacccgcgttcagtagacgaggtggagaaaagcattgcgtgggatcaacttggcaatgtggagttcctaagagagcgatacaaggtatgttctcaattgacctatctgagcttcagctgactcacaccctttaggaatggaatccgacggtcaaagctctgaccgagcttacaccatccacaaatctctatcccaatttcgcgggagatgctctcccaacttgggtctttgggtcacgagtgactctagtcggagacgcagcccatgcccatggcggttccttcgcagccggaggctcgctggcgttagatgactccctcgcccttggccttgcattcaaggaagtgttcgcttcaagaaaggccacgttctcggctggaaatatcaagaaggcattggggctgtacactcaaaccaggcagccgcatacagctcggttgctgggcattgtgcacagccagatcgacaagaaaggtactatttttgcgacacccgaagaagaggatgctgcgcttgttgctcggatgactagcaggccaaatacggagtggctatcggaacacgatgttgaagctgcgttcaacgctgtcgttgaacaggaacgggcgcagcgacaggtacgccttgctgcaccagaaaggaagacaggtggagagatccagctccagggaagcaagttatagaatagagtcgttgattgattcctgatttatttagcacatagaggattgtgtttatgctatgtggttactttttcttgacattttaactggtgagacacccgaaagacatctgttcatcggaatctatgtacctatccgattagcttttgcgacattcggccgaaaagcaagactagggtctggtgtgctatacaacggatagttaggacagatgatctgaattcccgagcaaggcttgtgggccaggatgtgccacgaatatctgttccactatgctttcaccatgtctcgggaatcgatagggtatacgctccataaataatcaattgaggagcctgatgactgaagcaaacgtgtctagtcccagcctcccaggcttactattgtaaaacattgggttggttatccaaggcttgggagaaaaacacaagtggcaatgcgatagtggatggccctagaggcgtaggcagaatgataaaagtgcaagccaatggggcttaggcaaggctagtgataaggaataaccttgtataggagtatacgatgtgaacatcgtacttttccttgttcggttaagtcggatgttccgtcaaaaggggcggagcttctgttgaggtcacggggtgtggctggtgcaggtcaaaggatcaactgaattctgcgtggcgtgtgtggcgcacgcatgagattatggctcggaaggacggaaggctatagtttattctagtagaatccagtcgaatgaagcaaaatatagtagatcgtcacagctctttgatctgaaggagggctggaaccgggaacaggtggatcgccaggaacataaagacgtggtatgtatgccagaggcagtgcaaggacagctgcgcctcacgaaaaaacataccatcttgtattaaatagagacagatccagagtcctttgtctttccagttcaaacaattctgaataatctcgccatccgacagtccattggacattctagaacgtttctctaaaccagttcttatccggtggcaacctcctttatcttctccttatccaacatcctccaacatacccaaaacatacaacctacacacaaaatggctacttcagtttcaatgactaccccatcccactcctcgcggccatccctatccctagatattgccaacatgcccccactctcccagccaacaccaccctccaacaccctcctaatcaccggtctgcacgatctacttgtcttccaacccccagcactggaggaaatccgcaaacaaatcaccgaagtggcacctctgaattccttctccccactcccgtccatgcgccgcatcgtgtgctccttccacaacgaaatcgacgccacggcagtgcgtaaactcctggacggcaagcgcctcctagaccgcaatgtgtacccgcggatctacttcggcgagccgacagcactcctagacggcggccgaccgaaactcctcgaagccccgcaagtctccaagatgttcttcatctcgccaccgcccagcccgccgcacggatgggtcgtgcgcaccgagggcccgcccaacaaggaagtccacgcgacggatctggcacacgcgctggcgatgctgaagacagaccatgaccatgcgcagcccgagccggctgcagtcgaccccgcaacgccggtctctatctcctcggacaagcgcacgtccagctggccgcttgctggccatcagcgtagcaggagcagcaccatcatctaccaccccgaggaccatggtgacagtccccatcttccggcggttatggttgaggatatgacgctgggtactgaggatgaggatgtggatatggatgcgatgagccccattgagatgtcggttaaccagatgccgcctaagacttctcgtccgccgcttgagttgatggagtagtgttttccggggatgctgttcttttgtgttctacattctgcatttttagcgaggcatggttgtttattgtgtatagtcgcatctgtggcatgccaggcgttgggaaaggatgggcatttcagcagcttttccgggatttgcttgacgttattctttattgctttacgaggaccattcttaataagattcttaaataaacattgcatattcatatcttatctttggtagttgtatctgataatctatactaatgttattgttggctcagtttcttggtttgatagtgagctccgacatcgtcaatttgcagtcaaagagtgaccacacactgctccatagatctctgcctagtcctatacaggtgtagaagctaggacaataaagccttgagggcttgttccgaccttgagccggtttgaagtcctgtatctaccaagaaacaagagcatgtagattttcgtgattggttagtagtctagggcattgactgaggtttattgttgattcccgcatgatgccataacttataggaagatatttcatagtttagcaagttccatgatattcagtattttcaggttcactgaaccatcgagtagatatttgagatacagagaccagtcattctctatcatcagaagactgtccccacagcaaaagatacaaagaatggaaaactccagagtgcgcccccattcaccaggaaatcaaaactccattgcgcatgctcaggctttatttttatttgctgggttatgcacgttcagaacccatagctgctctgtccgtaaggcgtagcaccatacggtgtctgtgcactagcgccccaagcactagccgcaccgtttccgtaggcagtcatgtttccgtcaatgccctcaggtggctcgtaagcatcggggtcattggcacccatcatctcagcatcgtcagcacctccgccatgtccatcctcaccttcacccaagagcacggagacggtggttgcgagcttgcgctggagcgccacaataccctgctggataatcatatctggctcaaggttgccaatgctctccacgtcgaagtagaagcaattaggctcagcatcgtagtcgaagggctggtcggggttggcagcgggttcccaggcagcgttttcagagataggcctatcaagagtcggtatgttagcagatagatcgaagaaaactcgtgaataccagctcaacgcctagatacgtaccattccttcaccggatcctgctcataccagtagtccacatggcgcaggttgttgttggggtcatattcaaagccgacagcagcagtgggcgcccacttcgcatgctccttagctgttcccttctttgctagacaagtcatcttaatctcctgccctttgcgcagcttgcagatcaaggaacccttgttctcggggtcagtggttacaggatcgccgatcttgtcgttgatccgctcgccgacgacaaccagatcccgcgcgtagacagacatgatgccgctgctgcagcgcgcatgcagagatagtgtcacgctgcagcgcacacagtggtcttcgcagtcgcagtctcgcgtgtagtcgagatcttggtcgcagttgtacgagttcaaggggatcatgccgaggcggtgggcgaggaactcatcagggaggaccgaggtattgctttcgatttcgatgatgtcgagtgccaaagtgggcacttcggcgaggataactcgtcggagggagttggcgaatgagaggtcgactgcggtcagtctgaaatcgacgcggtaaggttccgcctgtggaatttgtgagtcttatgtcctgctgctctgtggatgtctcagcttacctcgcggactgttacttggggccctgtgggctcgagatccatttcgtaatccatgttggtatgtatgcggcagcgctgctcgctgccacccttgtctggagctgaagatgtttatctgcggggcgtaaaagaaagacggtaggttgaagagtgcggagtgcagtggcgaatgacagggtaatgagaattgttgtggtagatgaattgggcgcgaagttggcttgagggcacgcgggtttgctccctcggagacagctttttgcgctttgcctaatcgggtcacagcctctgaaagtgccaatatcgagtcattcttttttacatttacagccataataaaatgctttcacttattttctatttattctacggttctcttcttcgtattcagattagagagtggaggaagtatttcagattcgattcagttgctgggtataaacactgaatccatccaaaagactggtatctagaactaaaagaagtgtgcgctcgattcaaatctggcaattgaagccgtgcaattgattcaggataaagtaatccgatatcacagttgataagctaaggtatcctccagtatcaatgcaagaacgtcccaaagccttcaagtctgcttgcgaaagacgtctatcagaaggagacaaagcaaagcaacacaggctcagatgttcattcgcaaatgaaacagcagacgggtagcggcagcccgtcgaagatgcaaaaaaaggtaaaggtagacaaagccaatagtagaagcgacgaagccaccgttttttggagttcatgtcgagtcattatcagggagcagctctctcgggatagcagtgcacatagaggtagaaaaaaagagggagggggggtgtttgatctgcaagagaaccgaatgtgcacgcgatcgaggctaccgctttaaagagctgcgatgcaaggcttcaagcaactcgggccgatttgcaagggcagtggcagcctgtgtatacgaaacccactgccgtttccgcttgtgcatctcgggccattcggtttcctcctgctggacggtgacttcgaagaactgatatgaggctttgggcgcgtgcgccgtgagaaggccggagggtctcatgtccggaatgagtcccagatctctggtcacgacacagatgacacccgcttcctcccaggcctcacggcatgcagcctgctcggcagttttctcatcgagctcccaaccgcccttggggagcacccagcctccgggtcctgcggattgaatcatgaggactttggtcttgtcggcggaaatagggacaacgccggctaccagtcgctcgccttttgagccgtagcctatgccaagccgttagagtcaggaaacacggggacagtgtagacgtaaggggtacgggtgcccccccacgtgcgcagccgcaaagcgacaccagcgataactcacgttggtttttccgcccaacgcgggcttccatagaccgtatttgagccattgtaatagacaatcgaatatctttggaattactccaggatttggtgaggggtggaaagtcggggaaaggaagaaagggagaaaaagagtggaaaggccaaggatatcgaaaagatcaaggaaaacccgatggatgatgctctcggaagctccctcggagcctgtcaggtctctgaggtgagggaggaagctccaggtgtctagggtggtgtcaagggacgggagtacagcgcgagggcggtcgggggaaatttttttttttctctttctggatattgcggaggtaggcaatggagatcaggtcttcccgttcatgcctgacgggggattggaatggtaagtggaaataggcatggttttcaaaagaagaactgagaaatgggaggttattgaggaatggagaaacgaagagaagtgggaatggaggggcacggcggcgcccgggagaagagtcgaggtacgtttcgattttttcctttgttttttgtgtcttttttttatttttttgtgctcttgtttgactatctcaacttgtctttgttatattgtgcactatagtgactctagccacaacagagagcgcgtaacctgttcaatggccttgactttactctgtttcactctatatatggtcatgtgacactccagatggaagaagtaactgggatgtttctatatttgctagaatctgctgtattttgctatatttgccacaatccgctctgacctactgtaatgtacgcttactattccaatcatccaatctcataaccctgtgtgcgtcgggtaatgagcctcttacaacgggatttggtaccgagatgggagaatttcgggagtttcgaccagaaactataagatcggccgtgtggctggagcgatgagatgcatagacagacctaactaggtcgacccaactagacctaaaaaaactacataagcacgcataaacgtagtcaggtcccccttgccgtatagtccgcatttacaacattaacccccgccggcttctccgacttcatctcttccgatactacaactcacgtccactcgccagtgcacgccaacggacatccaatctaaacatgcaacgggttgacgccgaacgcgcgcgagaactgtcgctattccgccccctaggtacgtcccactctcctgcagggaaccactgagataggcctctgttaccccgtggtagttccactggcccagagcgctaccgctgaggggaatttggcggggatggcaacgccaatgcatgcagctctttgatcgtccatttcgatgcagaaactaatgtgatgtgctctcaggttaccaaaagaactcgtgtggctactgcaagtccaaagatggaagttggttgcccctgactgctttgttggcccatttttcttctttcaggtctagaatggctatgctgactagtaaaaggtgcatcgtactacgccagttccacgtccgtactcccggaacattatcaagagctaatcaatggtggctggcgacggtatgaaccccggttcaatttccctgtagcccatcagaccatactgacatatttagatcgggaaacctctactataaacaaaacctgcttcggtcttgttgtcctcactacaccctgagattagaggcatctgcttatcagccccgccgggatcagcgcaaggccattaacaaatggaacaaattcattctaggtcccgagtatatgcgaaaggcatcccggctttgtccgcaaacccgcgagtaagcaatcctatattaccaatcttgctatcagatgactgctaaccaacgcatagagagaaaaagcaccgcaagtgccactttgaccttctgcccgctgtccaccagagcgagtacgaccacgtcaaacggccaattgaccctgctaccaagcttcccattgaaccagcgcaccgctttgaagtcaccattgaaggtgactctgtgtctcaggcgaagtttgagctgttcctcaagtatcaaacggccatccataaagaggatgtctctcactggaaacccaaggactttcaacgcttcttatgcacaggtatcaagcgaactccgaatcccctaaccgccgccaatgcttccgagaagaaactcggttcatggcatcaatgctatcgtcttgatggcgagctcattgctgtcgcagtattggacttggtccccagcggcgttagctccgtctatgtcttgtaagataatggctgactacacccgaagacacctaaatgtgataagctgatgttcggttccacacagctacgatcccgcctatgagcaatgggaaatcggcaagctgagcgctatgcgtgaaattgccttctcgatcgagaatcagtatatgtactactacatgggtaggtcgcagtcgtggaactggtccttattcgtgcatctctgacaatcgacatatagggtactacattcataactgccagaagatgcgttacaaggccaatttccgcccccagtacatccttggtaggttcgactcgtgtctagtcttggtacatacttttgtactacgtgaaaatcatgcacaacattaacccttttctatttctcagaccctgaatcctccgactgggacccgcttgatggcgaattgatggagaagcttaattcccgttcctatgtctctttgtctcgagaccgaacatcctcgcctgcgcctctggtcccggaaagtgatgccgatctagaggaggtttccctcttcgatctcggtatgcctggtgttcttactatcccccaagtggaagcactggacctggatcattggctgctgttctttgacaacaattttgttcacatgaaggtatgcatgtattctatgattttcggtcctagggatgtctttactaaatcaaaataggatctggtcaaatgggaaacgatgtcaattacttcgccaatgtccatcaagggaatcgtggccgagttggccgcagtcctgggcccgaaggttgtccgaaacagcgcagtagacttgctcggttgatcaaagacggcgatttgagcctaggtttactatcaccgagaccgactggggttccaaacacccgcaacgaatatggaacagatatagagtaattgtgtcgaataattgattcacatgcaattcagtcaaatccgccaaatcgaggcagtctctgattatcttaattctagatccaaatgacaattcttagcaagcaacctggtaagtctataaagttccttgaatcaatgaaatgctagaagctcgacttctactagtcctgaaggatatgtgacgtgtacgccccaaattcaatgtcatagatcgcgctttccttccacgcgtatctacgtgcctacctaactaggaaaccatgcccacgtgattcattgtttaactctctcaactctcctcactcttctgacttttctcaccatcctaatactcataccctttcacgcgggcctttggcacctagtcatctcgaatccctcgatcgttcttccttatctacgctggcccttaaaggggaggtgctcagccaggtttgatttcacggagcatacgatccgcatgaaagagatgagatttgggttcctagtaagaggcaccttcctggcattgaaactctctactaactctttaagtaccgatttctaattggataggatcaagacatgtccatctatcgaacagccgttgaaaccccttattaaggttgtcgcggtacgaatcgaagggagttgcatttggggaatactttcaggactcaagttggccctccctccaccaagccctcgcgtttctatgggggtttcttcttttatatgtgggccttctggtggaatggaggattggttatctgggccagcgattgatcgaccggtatttacattgaattctgtgaagtcggatatttatagaaatagtcatgttattcattattatctcggaggcaattttggtggtggatcacatcaacgaaaccacgtctttctttttccaactagaccgaataccctctggtctccttgatgcttgccgtttaaaaaaataattatgtagctgagtcgtgcccaggtggtatcaactttgtttgctgtcttagtaccatctaagactccctccctttgtctacttcccaacacgttcacgcacctgcacggtttctatcctaagtctatcatatttgatacatacagagggggtcaattgctatgtcacgcggaacggaatagaatggaatgctatgctaaactatatttatggccagaatattgtctttctcttcgttggatgctcatcctctatttatatcaataaggagacaggaattgacctattgctcctactccttggggtataagagtaagtaaggacactcgtttatcatcagcggttactaatatagtacaggatatttcaactcggcgtgagagagtgtatgtggcacctaccgaggttttcgcataccatggggcatgcactcactatgcctttcgagaagacataaatttggccgagcaatatcagcctgacaaaacgatgaagcaaatacagataatccacggtatacaattcataagtggaaggaagcattatcccgatggctcctttgcctccatctctcaacaggacgcccaccaggatggactgggcaaattccatgctcttgtgattctagaattccgatcatgttgttcatgaatcgttgtggcagatgaggccggaaatcatcatacctccgaaaattgtgacgtccactgtgacccgagcgagagaatttcagtgtttttgatatatacaacaaccttgccctcatcagacagggcttccatataggttatcgagctcaaagtgccttgggtggatggacatagaatcgcaagctttatgcaagtccaatcttctaaccatggatctcacttgcgaatgttgttggccaaatctctggaatttataatggattttcaatgcatgtacggtttcctatccatctacaagcaaaccatatccctgagacaacgttatattgctcgccagatccaatcgagcctagcctcatggctcaaggtgatataagatcacctcgaatgtctgattggatgttctcttcaaatgttctttttctgtatattcctttcttctcgatgttatagctagaaaggtgatccttagctatggaaggcagaaatgcgaggctcatcaatcactctacaacaatctaaggcaacagagaacataaaccttgtagaagacatttctatgtataaccaaaaacttatataaagttacacaaggacgatgactatgaacagtaagaaagttcattcatacacccaaaaaagaatcccataactagacagcgccatgtagtaaaatcaagccagctggcgccacatgtttctatccgtttgcctcgcaatcctgcatattcgccacgaagtccaaagaacaaaagaaaaaaataagcagtcattcaaaaaggcacagcaggtaagccaccatattcccacgaaaagcccgcagccgcggatgccccctgccagatatgccctagaacgccagagcggagagacaaaagaacccaaccaagaacaggatgctatgccaaaaggatacatgaggccaaaagaaagaaaagacaataaacaagatcaggaccctcaacccttcactcatcatcatccctcccctctaatccatcaatcatagcccgacttggcttcctcccagccccatagaccagctccataagcttcgccttctgcctttcccggacagtccgtaggtagtcatatgtcccctccaacccacggatctgcccatcaataacagcctcaacaggcccaagcatgcggcccggagaaccagaatgcccattcccgttccccccatcaacggacccaacaaagctaacagagtcattccgacggacgagcgggctaaccagcttcctgcgcagcgtctctagattgaccttcagcgtgagcagtcggccgcggtggtcaacgaggaggtgtttattggcgacagtgcggctgcggacattcgcgagcaatttcttgttcttctcgtatttgcggaccgccgcggcatcgggccctagcacgcgagtccacagggaagaaagcatctcgccctccgcgcgttcctgggcgtcggattcacggacgactgtgcgctgcaggttgaggaactggcggtcgatggactcgaaaagcgcgaagagcgcggttgagtgggtgagctcgctgtttattgattcttctagcacagcgaggaactccgtgaaggtgcgggttagggttgtgcgtgtccgctgcgcggaggttggcccaaagacggccattacgaggtggccgaggggcgtcgttgttgttgaggttgcggggacgccgttatcggagatttgagctgaccgttctagtgcgccgaggcgcgaaagcatgttgtgcatgttgtcgaagacgattgtggggagggtgcttggaggctgggcggagagggtttcgagctcgcgcttggcccagtccattactatgaggatggagtcgatgtccgagtcaacgtttgcgaagaagcgggttagctcgagagagagggacttgagggagtcggagagctcgtccagttggcgcacgattataggtgcgctggtcatgtttgtgccacggacagactcgctcaagtcccagactgcgacaccggtttcttgtagtgtgccgatttgctgaacgccgttctctgagtagtatatcagtggttcgaaggagcgtgcgaagccggatagctttactaaatcggggatcgattgcgggaggcctggcaggaccagggcgcgcatgaacgcgactgagatgagaaggattaagatagataaggtggtgttagacttggagctggtcatgcgctcgaactttgagcgtaggtagccatacatcgcggcaatgggttctcggtgctggacttctgcacgcactgcaaagcgaatgtctttattcattcacaacaatcgttagtatacccgcgcctgcaactgaaaccagatcagacagggcctacagttgctcagattctccgcgccaaagcccaccccatcgtcctcgggactgcgccgggatgcgcgccctgtattcggggccggaggcggacttggggatcttccttggagggggctatctgcgcccgccggtagaggcacattagccgcgacagagacgtcgcctggggtggcgcgatcgcccggtctactcttcgcggggccctcgagcgcatcctcatactgtggacttggctcgcgcgactgggaaggggaaacactaagtccgactgtgggcttgagctgcaagcactccgcaatgaggttatctttgcgcagatagggctggtggcgataccatccactgccttggacatattcgggtggatggaagccagggggtgaccatcgttcctgcgtggggtcctcgatctctccatcgtctccgtctgagtcttcagaccggaatccggagtgttgggatggcagggcgaacattggggacctttggggattggtattgttttcaaagtcttcgagcgacgcgtccagggatggatggtcgtcgaagacgttgtctaactcgtctagcatcccggacggcgtatcgcgatagtcgcgcctcagaagaaaaggcactgcagttctcagcgacgaagcgcagatcaatgcctatgagtggcgatcagttgcggttgaagcacttggacttccttaggtaaacctgagtggttagtatatgcgctgggacagtgtctcctgcgctagccgttacagaagatatctgagcgatgaaccccactgcaaagacgcgataaggtatgatgcgatgcgatgcgacaaggcaggtaatgaattctagatagcgacaccggatatctccgcgataggcacattcgatagttggtgttggactaagatgcgatcaggtaacgcgctggagattaatatggaactgggatcgaaacgcctccttgagcaatgcaggaatcaggaatgagaagacgagaaagcatgcgtcccctcacttgtatccaggtcgaagaggctgggccaatcagcctaccccctgctggtcatgtgctgagactcgacggtttatacacatcagataccgggagaggcacaggggtggtacgagtccagtacttcgagtttatgttgtctaaacagtgagcaccaaggtactcgtcaagtactcttcaagtatatccgtgcctgaccgcccatgtttgcccaatcgatacgaccagggcccccagccaatcagaagtcaggcctccatgatcatccgaagaatctcaaacactagggatagacttgcataaccccgtttgcagtatggagtacgtttgttctattaacagaatatcaaaacgaagtggagcagagaagcagaggagcagaggagaagagaagatcaaatctattttgactcatggaaattgtaataaaaatacaagcccggtcccttgggaggcccgggaatcagcccatggcgccataatcccagacttctatggggagaaacagaaaaaaagccggggaataaaaaagaacatcaggtcgtttatgcggtgttatccttgagccagctatggggttgtcagtggggttcaggggagtgtggatattcgcgggtgacgtacgtgatgagatcgttgcgctccttggtcttcttgagaccaccgaaggccatcttggtaccggggatgaacttcttggggttctcgaggtaggagaactaagaggtattgttagtcgccgatcggagcggaattgaacgtggcagttggcacttaccagagagttctcgttccactcaacaccggcctgcttgttggcgtcggtgtaggcgtaaccctcggcttgaccactgtgacggccgaaaagaccgtggaggttggggccgaccttgtgggcaccgccggcctcggtggtgtggcactgggcgcaacgggtctgaaaaaaaaatatccgttaggtttcctcttcacttgtctgcgcgtgaagcaataatgaacatacctggaagagcttggcacccttggcggcgtcacctggagcgaagttgagattagcgattttgtcggcttccttcttggcttcttcgacgagagtggccttggcacgctctgcctcgcgcatgtcgatgatcgtcaaggtgcagaacacatcgaaggtagtcatgttgaatatttccaagcgtggtatttgcgaaaggtggtagcgatcgcaattgaggtaattaggttgacgagggagttgcaatgtgaggaaaggtgaggaagtgttgttcaagcaccatctcaggttaacaaagcgcgttgccaattgagatacccttcacttccttccctgaacctccatggcgcctccccgacctcctttcagctcaatggggcaaagtagatagcttaccaggggcgaaagattcttgcttcttaggagccattgtgaagtattatgaaagaataaaaagagaagttattatgacactgtactgtacagaaaaaactaagaaggggagagaagaaaatctggttatttgtacttgggccccgacgcttcctctcgtaatccgccattccgccaatcagaggggagatgattcaggcggacgggcgcaaccggaaacttcggtgtggctgttgtggctctgacatctttcactcccttgtttgtgctttctcactgagacttggaggttcaatgcttgggacagctggcggtttgtctgtggcaacaaaccgacttgtatcctctatcttctatgtcccgcccctatgatctcatacttcatcatcagttagctccgatacgcttgtgtatatgcaaagcttcagttggctcggaaacagcagctctttcaccaatttttcactctacagagcacccagacgcccatggcaatggtggcccacatctacgcatattcacccttcactccttctgctggagaactggagcaacttgcccgatccaccgcagcttcgaaatggcatgattctcattcgcccgagagctggccggtggtccggcgtgtggatcctgaggcagaaacggttcattctcgatgcattctcggccgtgaatgcaatttaacctgttgccgaggccgcggtaagcttcaataaccttgcaaggttcattaggttggtttatgtaatctgtagtagtctcagtcacgactctgtcgtacaactttcccaaacccatgcaattgtgggaaacacgggaagtaatggatactaagccacgcgaatatttcgaaggtcaagtggtctcatcaaaatttgcattccccgaaatttccattccccgaaatagtcagaatatgcggtcagaggtcagaacatctcgactcaatcggcatccgatatcccgatacagtcacgtgatataaaaccttctccaaaaattgcatctacggttccgcatctagataagtcaacaagatcatccaaccccctccacaggagcaaaagggcaagaaaaaaaataccaaaaatgccaaccccaatccccggctttctcctccctcgaggcccaccctcagcaatgaccctgcgcatcctccaacgccaaaacacccgacgcagcttcacctcgaccggcgccgcgttaaagaaagtcagcaagagcaacaccaatgccaattccaattccaaagctagcggcacttctaagccccgcgttctcgcaaagcccgacagattccgcccgccctcgcacccccagcgcctgacgactccatctccgaagaacgcacccccaggccaaccattcgagtatggcccgcggataacggagaaagagcgcatacagcagagcaagacgcagtacccgggcatgttcccgccggagggaacagtgatgtttaagttcctgacgagcaagtggatccacatttggattgcaatggtgagtttccgacaccaagctccgggtctaccaaaagcaaagcttccaggagaactcggtagatcaatcaactaatcaactacacagagcgtcctgatctcctgcgccgggttcaccttcacaactaatttcaaagcaacctcgccgttcgcgcacctgctaccatcctggtcgagtctgctgacgtcgcctttcagcacgatctcgcaggcttttgctgtgtggcgcatgcatgtgcagcacaactcgatgcgcgtgcgggagcagcgacaccgtcgcgttgaggatgcggagaagaggaaggagtatcgtgttgcgcatgggcttgagaaggcggagcctgagaagaaggatgagggtgttgaggtggattcgcagtcgcctgttgctgctggtgctgctggtgaaggtgcggaggctgcgaaggagtttgttgattgggaggggaataagaggcccgttaagaagtggttggggatttggtgattcttatttcctccacgccttggggtgggctatttcagtcatatctacgggtagtatagctatctaggtatggcatatgctgtgtagggtttggctgtgggtatgtatcgatgcagtcatacatgagggagcttcagacacccttccagcagcgacgttggtgtagatggacgttcaatccattttgtacattagtggactttcagtctacgataggaaggccatctcaacttcaatcgatctaacgataaagagaaacgatttaaccaaaaaacaacgcttttctccaaactccagaagtagcgacctatcaaatcaggtatcaaaagtcgcaaccttaaagtaatgctgtactttagtactcatacatgaaatggttcaaaataagacaatcattgcaccacaaccccctcaagtccctcaagaacctcctccccaacaccgcccttaccgaggacattcttaatcatacgtgcaataacattgcgcttgacaccaccccttcgcggacgccagacaccctcaacctcctcctgaccgccagactcctcgccaggccccgcagtagcaccaagcatattcacattctcggaattgggaatacccggctgagtgaggcgggaggggggatcgatcgagcggatcgatagcagtttcagagtctcggagtcactgctgcgcgtaacagagatagccaggacggcgtctgcgacggcgatttcttcgcggttaggatcgaagatgacgttttcaccgacagaaataactagcagcgttacaggtgggcggacagggtatgatggtgcggcggagagaggagattttgaagtattggagcgcgggtagagatactccgcggcggcccagtcgtcgtcgaagaaaggatcttcttcacccgtggacttgagtttcggtagcttagtgctgaggagggcgaggtgggttgtgagcgataggagggggagagggtatgcgagaggttgagagagtagtagaacctagggtatgacatgtcagcagtgatcaagtcatacttttagaaccccagaataaccataaaccgagagacagaaagcgattgtcaaaacttacatcaatatacaagcgccaatgccaccgcttgttaataacaagcctccctttcaacccaccggccatctccttcgaatccccgctcccaccagaaacagaaccaactagactctctcgcatcatctcactcaaaaacacaggcagggcatcatcgtctctaaacccggggatctcaatcgacatctgcacccactctccctgtcccgagacagcggcggagccctcctcgccctcgcggttcagtgcgtcgccatgctgcgccagactgcgcgagtcgagcgtgtcggctgcaataacggtcttctcgacttctgctttcacgccgacgatcgcctgcgtgccgtctgcgaatccgatgcgcgcgctaccgttcgcgccaggcaggatggtcgtctcggcagacagaggacggaattgtgtgggtgagcgaccgtctggtcggattgggttcttggggaggctgagggaggtgtaaaggtaggagagttcggcgggtgagaggtggggcacctgagaggcggaggaggcttgtctttgatttgacattttggcggttgtagtgttggtgttgcaggcgaagcgaaatagactgctgtatcttggaggatagagctggagttcggttgcgcgaggttaagctcgtagctgttggcgggcggttgattttgtggtgatcggcctgcgatttatgaaaagtgcttgccgggcgtgctggatgtgctaaggtgttggtaacccggattccaagctatggccagtatagtttcagctggcgaggttgaacgggggagcaattgaggaagaaaaaaaaaaactaggtagagtcgagcaagcagtctcaatcaggaaatcttgatgggcaacggatgatcgttgttccgttgatattgatccatgtaactagatgctgtgatttttctacattgactactccgaatttcgtgacagaatgaccatcttctactgtgtaatctaatgtgcatgaattgagcccagtattttagcccaaaaatcccaccttcccacgctgttcatcattttcatcgccactcctcatgccaactgattgataggaattctaataagcgttacagaaaacagcaggtataatgtctcaaaataaagtctcgagtatgtagattcaatgcgtatgtagtaagatatgtatgggcatggcacaacggccaaagggggaggtatattacaaatatagaacggactggacccaagccagcacgccgtgggaaaataaaatgatacaagaattgaagcaggagggagagctatgacaggaatatgtaaatggaggggataaataagtgatagaaaatgatggacaagaagtaaagatggggatggctgtagccagaaaatatacaagcggggagaagagggggaaattatatggacaaaggagagagagcgcaatattcatcgagaatgatttgcaaatgtgcagatccgatatacatatcggatgaagagagagggtgaggaatacctaataaggtaggaggaaatgcggtatatgatgcgacttgcgcatgtggtatcaaacgtcaaggaaagaacccacgcccctgctaaatgatgaaacgaaaggactccatgaaaaggaaaaaatcaaacggcccaaatccatctataaaagggctgcaggggtatgaatgtagagaaatgagaaacttgcccaatgcccatatgtgaaaaaaaaaagataaaacaccctccgaaatggccagaccttgcaaaggaaatataaaacccaaaatgcgccttgagctatgtagcttgctcagtgtttgttctgttttgtaattttgccaaatttttgtgctcttcgcaactgaaaaggctgtgctgttgttcaaatatagttggatccaggagcgaagtagtcggatttattgttgtgatactcggcctcctcgtaagggggagtgggccagtggcggcttgcggccatgggatcaatcttgtggatgttcaacttgctaggtgtcgactgttgaccaaatgcagcagtttccttggccgtgggtgacggtgtaggataagggttctgctgtgcacgcgagttgtctggttgccggcgagcagcactgtgcgagtcggcagccattgactgagtctgggccaggcgtctagccgccttgctggcggagtgcaacacctcatcaagcagctcatcttcctcttcaggagtctcgtaccgatgaaccgggtgagtggacatctgcatggcacggcgagtcctgctagagataggagcagggttgttgctggtgacgtgaggcattgactggcgcttggtttggccgtcggcagaattgttcaagtgcactgggacgttgctcagtgtggacgagtccaatgagtacttgacacactgaagagccttgtccagctcgttcaagtcggagccttgctttggatcactagtaggcccatccagagccactgatgaacggttcgaccaagggatgcaacctgcgttagcctcgacgtcatcattaggcgctgattggtttcgtccagacaatctgcgggcgcgtttgcgcagatgcgagaagaaactctcctttgtggttggtgtgctagtcccggaaccattgagcctcctttcggcctctagacgattctggtcgtagtgattcccatgggagttgagggacaattgacggccgatctttgagctagctgatgtactggaggacttggaagactgactgtgcgccaaagtggcattcgcctgagctgtaacggagttggagagaggggagacagggcggatagaaggaaggattggcatcggtgcaccgtttgcccaggtagctcgcttgatgttcggcgggcgcgccttgacaggctggatctcaggtacggtgacctgagtaacagccgatggccgggcagggctttcttctgcagaaggtacagggctgtctgaccgaacgaccaatgatctccggaaccacgaaggcttagaagacaatgtaggagagtcacctggggtaagatttggtgacctgaagctcttctcggactgcttgcggcccagtagtctcgatgaggtggaggacttcggccgcaccggatcaaccgcatcggcgaagtactcgtggttaagcgcttgggtagacgttgggcggttcttaggatcccacatgagacaccacgtgacgaactcgctaaatgccgcaggccacattgggggctgaagcacggattccatcgcgtgtggtgccatcttggggaatgtgaaaccgagcttgtgagccaggcgtgatccttcacgccactcaccaccgccaatcttagcgcccgacttgctgtaccagtttcccgggctacccatgatctcacacacacgccaaacttgatcgacctcgttacctcccgggaatagaggctttaacgtagcaatctcgactgccatggcgcccattgcccacatatcgactggtgccgaatactctcctgctcgtagaagcacctcaggtgcgcggtaccagcgtgtggagacgtatgtggtgtatggttgtttggagtgagtctcacgagcaagaccaaagtcggcgatcttcaccgtgtagacaggaggggtggagggaggggttacgaggttagagtagcggctgaaagcggaatcattgggggcggaggttgagacgagaatgttctcgggcttgatatcgcggtggaagaagtggtgtgcgtggatgtggtccagaccggacaagatctggtaaaggatgctcttgacgtgcttgccttcaaagtatttatggtcacgagccttcatcaactgatataagttgccatccatgtattccatgcagatgtgaagcttgtgagagtgggggtcgaggaagatgtcgagggcagggacgaggtgggggtgaatgggtaatgttcggaggaagatgacctctcgcaggtctagacatggacccaaggagtcaaatgtcttcttcattgttttgattgcgacctaaccaatgagtcagtgaagcccaatacaccaccaatcttgctattccataccatagtgcctctgcgagcgatatgggccccggcggtccgtacgcgcgcgactgccacgctaccgaagcttccatcaccaatctccttgatgacttcgaagcggtcctcgaggcttgccatggaggtatgtgacccccgggtgggcatatcgtatgtgacggtcatgttgatgttgtctcttcaggtctgccagcagatcgggagaagaggaatgcggaggaggggttctagaggggtgttcaggtcagcttcccgacatgcttgcaaggatccggcgttcttacaattatgtagaggggaaagtttcgtcgtatccccgagtgaatgtgtatgtatgtatatggatatcaattgcagcaaatgatcatgttctgagaatcagttcgagccggacggttgggtttccattgacggaaaagtaaggagtgacaaggtaattggagggggagtgacggtggtcatgtagtgggcgatctggaaggactgaggaccgggcacgatgcaataaaaaggaaaatccagaataggaggagacccgttcctggtggaaactggagggatcgaaggaccgagggtgagcccctgacgcggtgacagctcgagctcctagacggggccgtggagacggtaaattaacgactctaggtcgttgcagatcagtccaccgtggcgaaaacgggatttgaatacggaatctcttggactggagtataagatgagagcgtagagactagaacatccgactatccgaggaatgaaaataaagagatgaagaagtaggagaataaaagaggcattgtacacatccaggcgcatatagagggaataatcaatatcctcaatacggaattacgaataccgcagtaccgaaagtataaaagaaaaagaaaaaatcgatgaattaccaaaataaaccaaacagaaaaatcagaaaaatcgggaaattcccaagaaaaaacccaggaaaacagctaaaaccccaaataaccggttgatcccgtctcaaccaatgggacgctctttgtggaaccgggtaccttatttcaattttaccgtacgcaagctcaaacatgaacatggacactttgggaaaaagaaaagaaagagatgagaagtatcaattaatgattatattcaattatcgttgtcatatttacatacgttgtagtcgaggtccatgttgtgttgtatacaaactctatatgcctataacatctacgttgttcgatttatcatctgaccgctgtgaacgcacggcgcctaataattgaggaggttgggcataaataattgtgtgcagcctgtaaccgttgcccacgctctagatggtctgcactgtttgggatatgtcagcagttgggccgcgttggtaatttatttgactcgaacattagaattggccgccttgaaatatcacaaggctaaatactctaatatctccagatacaaagacatctgatcttgactttgatacaaaagtactatatacacactgatcacctcggttaccccgtctttgtacaagtcatttctagcggagatcttaggctctcggttgatgtaccagatgtacgatgtagatgcacgatgtaagatgtacaggcacaactcgcagattgggagagaaaagcaaggagaatctcttctctcctcgtctcatgttccgttatgtcatgtcctaccttcggacttatactctctgctagtcgcattctcgcacggatagtcgaacaccggtcttgttattcgccttcttacagatcatccctgtcttaatgcctcacctacaagagtacggagtaattcgtgctgacttctttgacgttgattgacggacatccaaccacctgatgtccgatctcctgatgtatcggaacactggagagagatatatggctatctcttttccgactgatccttcgacgggtagggccaatcacatactggggtaagatgctgccatgtggaagataattagtaaattaggttcgcgggtggacggaaaggttcgcggcatagaaaagcaggtcgacttaagccgcgatgagctaagagtcgcatatgatgggttcttttttctctttgtccaaaggtacacggtctgggccctggatgcctgggggatcattgacgggtttctccaagccgtctccgattgggacgtaggatttgcttgttgattcgggttctttgttgaaatcccgtctcgaagactcggatggtagtgtctctgttgccatggatgccggatccgtgttgacgtattacaaaattttagggtctaggacatcgtacctgtatatgtatggtctgaaaaaactccaatcaagttgtgacatgaaaatcagagaccaagcccattatagccactttgccggatgtctctaaccgcgtcactccggcttctccactgacttcaaagctaagggatgtttgtggtcacgataacaccgactttttgactctctcccacagtggagtacagagtacagagtatggagtgaacagatgtaattacctgcagaaagcgggatggaatgcacctgctgaaccctggggcgaccgttgtggccaaggatcccaattttatttggactcaggcggagttgaattggaagagcacttgacctctatttcaacgcatcaattggggtccactgtgtcaatgttcggtgtttgccccctaatccgatcgctgcatgggatttcaggaacaaaccttgggaagtacataaagtacacaaggaacacatctccaagggccgtaccgaaacgaaaccaaggttcgaagagagtgggccacttcacttttcgctttttcatattttttttctcttgaccgcacaatttgattactaggacaacaagctgcgacgtggagtacacaccgtgtacaatatacgatatgaattgtacacggaataccgacattcacagcacatgttccactctctcccactttctcccaccttcgagtctatgattcgctcagtggcgctttcaactccacgcgcaccaaccataaaccaatcactacggaccaaagatcagtagtccgatggagtatatacgccaacaatgccattggtcccagcagcaaagacagcccacttgatccatctatcgtacctatgacgacgccttcttatccctcacaattgcctagtcacgcactgttgattcggggaactgcggaatgctccaccgtgggccttcatctacggagtaggccagtcccaactacccgcggagaccgcgatagggggaaggatcagtgtcgccacctgggaaagcaaactagcatttgcttcccaatctgccgggaggcgccgtggtgttcttttggccttcgagaaggcagttcctgggaccgatatccggatttattgcgcaacggtctccgaatggttatcttgcctcaaaatggggtgattattacttagacctgggacttttaatgcggaagcttgtcgggagcaaatccgcagccaatctctggcctcgttgcccccctaacagccaacccccccttatctagggactaggtaaacaaactggccaacgaacacacgatcaaacggatatgcgtcccgaacttcccagggaactgcatagcgaccgttgggaagttaccaatttcgaggattagcacactaccgtcgacactaaacctcctcggcccacttcaaacgccgaaagtctgtgttggatttccagaatccgtggaagccgcgggagggacacaccccttgatcgctggaactgtcagatcggagtccagtagattatccgtcccagctgcacacgagggcactaaattagcttgaattggccctcggtgctgcgtagctgagttgttttcattaaagtggacccactgtcactccagtaaccttagatttatatgaagcttttgcgcattgggaaggtgtggacaacatacatgatacagcatacaccgacagacagcgcggagactttcacccagccaactcgcactagccctcaatggtacctatcgtctccgtgcacagtggcagtgccacttactgcatgtcattcattcattttcttcgcattcaaatctgattctcggtatatttagatcgcccagctaagccgtgatgtcttgcgccgcagtaatctatctaattgcgaagtgatagatgcccctcctcagttccttaccatgtcgtgctgcccaaaatgggtctttatgtgtgtcatacctgactagcttatttcatttctctggggactaatgtgcgtggtccggctggctttgaaactactccgtagcccctatattaagttgtatgtaaaggcaatcaattatgctcctttgggggccttgctccgcttcttctatggttttctagaaatcaaatagtctgctctcagctgcacgtcggtgccttaagtgagctgagaatgctgtttatagttagtactccattttgaggcgtcgtaagaggtttcttattgctctgctaagttaataatgtctataccccgtaagatggccaattatgccatatgtttgtttttaaaaatcaataccacaatctttgaagagcaaatctcttatgcggccttggtactccatactctgtggtgtttttagatctatcccgccctctccccacgccccctttaatggtataagaattggtcgcaaattataaatagtgtaaatagtgtaactaaaaagcggtgccttagatggcagtgagaacactgtctgattcaatgtcactcctttttaaacgtttgctttcttactatctctattgccgtgctaggcaatcgacttgttatccaagctggccctgatatgctgtatgtttgctttctataacacaatgcgcattatatcgtttgatcgatcacagctttgatttgcagaatctgcatggtatctatatacttcgctattatatatctatttcagacaccctcaattgaacctcttctcttagtatcatttccactttcatgccttcagaccttgttgagcagagatctaaagccaaaaaaacaagcaagacaatgttcatgatggaaaagcaaattcgagatgattgaattggccagtacgaaatcctcacttccggaaagaacaacctgcgcagcgcgcgcattgcgtctgcctcgccaatataaattggatattgtcttctctctcgttttttcttcctcgctcaccttcactgcactcactcttgagacctatcctgcgaactttgcaagtctttaccggagtgtatcgtctttctgagatactaccatttcaccatgcctccgcgacggaaacggctccctgcgagcccatttgcacggggatacacaccccaaatgagagcggcgtcagttaaccctatctcactctaggaagcaagatggtcgctaacaaaatatcgatagcgtggaccgaattccaatcccaaacgagtcagtattctcatcagtcttggccttcaactgctcaccgtcatagaattaaatgctgcgtctgcaagcggcatcgcccacagtcccagtactcgaaaaaccaactgggctacctccgccgggcaatgttcgatcttggctacaatagcatttatgaccagcaggttgctaagtgtggcccatgcacgaatgcccaggtttgtgaggagctctgtcatcgttgcggtcactaccgtgccattgaccaattcgccagaaaccaacgcaatcgcgacagtccggtatgtttgtcgtgagctacgcactttggctgcttctaatacttggtcgatctgatagatctgccagccctgcatgaactaccagatgtccctcgatcctgccgatcagcctctggcgatcacggacaaaaccgtggttgaggatcaggtagaggatgaggatgaggatgaggatgaggaagaggagctcaattctgagtctgtgggccattttggatccattggacaacccgagtctgtcgatatctttggctctactggtcaggccgtaagttatcagaacgacatcagctctggtcaagtcttggtttactcatactttgaatgcaggagagtttagagcagggcatcgagacagctctcgtcctgcacgatgattccactgatagtgatggcaatgagagccggaacggatttgcaagagtcaaggtgggtgcctccatttaacagaacttatatcgctccggatggacttctaacaaaactttattgtataggcgcaccgtcctcgtcaggcgcctgtccctgagcccgagcctgccccaggctgggcacccggtactcgcaagatcaatgatggcactccttggaaaggaggaaggtatctctaatggtttccaacaccgtgccacgaacaaccctcgggttatgattgacgatacttctatctatgggcacctcggctgctaggctgcgtctggtgttgcagtttacggcatgctcttcttcttctacctctgtagtactcctagtttctcacttgcttttacttacagacggttcgacttcagggtctgcccatgatgtctcctatgtctccagacgctctttttttgctctttcctccgggaaggcgagtttctagtattccagccctgtgcctggtgcatgtcttacgggcaacctttctcatattctgattgatggggcttttactacagggtggggtggacttctaagtccgcgcctgatataaccttgtccaatgatttttctcgctttcttttctggggtcctagggttgatatgtttatgaagacccattagattcaatagtatttccaaggtttgccttttgagctcccatgggtcggtagacaatagtgccatggttatgacatcggtggttccgttgactccacctactataaatattgaaatcagcagcttagcttgtcggtcgagttattgtatgataatcgatatccaggcaagttccagctatttctggtgattgagaactggaaggcagtggctaataatactctgttctgtcgatcggtgtcccagccgtcggatccgggccgacatttggcaatgacatagccctatctttgaaatagtgcccttcacagctctgataggcgcaagggaaactataatgtacacattgcatggaagatgcatgttaagtctgcagcggttgctatacactgccagatacatgctctgttagtctgccgatcgtgtgactctgacccagtctagcaatatgaaagagcatatgtgggactttaatatagcaaagggccaatataacaaagagcgaccgtgtgatgtgacgtcgagacagtacaaagagaatgaatcttaaatccgtctcactcgtagtgacgatatgatcgccacaacgtttcactcgccccccactagcccctccaccgtaatttctagcaattcgtaatctgtgtgcgcttcttctttctagttattctcttcaaatcggttacattttgcaaggagaaactacacgtctttgctaaagagaataccccggctacatctaaaccctcaaacctccgtatggcctccaatggaaattacacgagcaatacagaccaaacgggcaaaatgaacccagactcaaacgagcatgggtacttgcccgcacgtccacttccatcctattatacaccatctcctcagaacatgccgcagccacagatgccgccgactgggtcatcggccccaaatctaaccccagagccatacaaccattcggaatcccagcgctcctctccaaacatgcacactgggcacatagacaatgcagtgagctctgcatttcaaagtagcggctccacaggctacctttccccagaaattatctcgcagatcacagcaacagtgatccagcagcttaaaacaaatgggttggacaagctacaagggtccggtgcgcccccgcccggctcgcaatcacggcagccgccatggcaaacagatggctcgttgcagccgcataaggagactccctctgccatacctccacagcgaagcagttcaatccccccgcccacttcggcctctgaaaagttccatactgggaattccgagccatacgtcccctctagttacgctagtgacagtcatcccagcccgaaacctgctcctgatccccatccatacgtcccttctggttatgctagtgatagtcatctcagcccgaaacctactccagatccccagccatccgtctcctctggttactccagtgatagtcgtctcagccggaactctactctcgatcacctgtcggatagacgtgcctctgtctccagtcagactagtgatcggagtcatcctagttactataaggcggaacgtccgagacctccggatcgggacgctaccgttatggagatgactactttggagcgaatttgggggaaattgttcgatgatggcaaggcgacgaagaggcttggccaattcttgcgtggaattgcggttcatatggtaggacttttgtctactctgacctactacggattataatggctaacttgagtagattgaggattatccgccgggaaacacccttgtcattcccccttataagttgcaaaagttctatcgtgacactcatgattcgaatgacccttatccatggcaaggttggtaattcgatctgtttattgacatgacatattctgactaaatatttagacatttttgatgatcgtacatcttcgatctcccgactattccgcgacatcagagtcgaacatcatctcatccaggacgatctagcaaaacgcccagatatcccaggcttaacacccaaaggcttcgagacctgggaaaccttgatgatcctcgcgaacccagagcgcgaatacgagcgactgcaaaaagcagtccgcaacatgcctatcaacaacccagaggaccagaaagagcgcttcccaaaggaaatcccgcgtcggctcttcccagagatcgcagatatcgaaatcagagaagacgtcgaggaccgaatcatggtccattgcggcgtcgatctaccatacatcacacccgaagaacgcaaccagacttctggccggtcggccagatcatccaccacgaccggatcgcccggagagcgaacccgctcatacgagagaggccgacccccaaccgcctcggccccaagacctgccgtagtcccaagacccgcctcagccgtgacagacgatgaagacgaagaagacgaagaagaagacgacgaggtagacgaaggagacgaaaccatcacctcggtcccgatcgagcgagaacgcaatccctacagcaacagtccaagcattggcaaagtctacgatgaacccagtcctagccacgaccacaaccacagccacagccacagccacattggatcgacaccgggacaagctccagcataccgcatgcccgagtcctacgaccgcgagtcgcaatacgcacgctcggggtctggacattcctctgagaagcggttctcgcatgatccccgcagctcgtcgcatcaccgcggaggcagtggtacctacaggcattcggatactgaattgcatggtcgtgaccattcggctagacattcagggctttcggcgcatgatctgtcgtataacgagcctgctgcgaatttgactgaggatgaggcgcgcagatatcgccctagtcggggtggcgacgaggaatattatcgtgggagtgggcagggaggagctgtaccccggtatgatcagaagtatgaaaagtattacggatgaatgtggatttggattgatttgttttagtgttttgggttgcttccttttggcgattattgcattgcagtcagtgtcattttcctgttcttctgcctttcatctcaactctggtcttaattttgattcttttcaagctgggcgtggcatggatccgaggatacccctttttctggggttgtgcacgattaacgatatcatatttcacgacgttctgctctttcgaaatacacgtgagtttgtaattttatcaatagcatcgagaatgaaaaagtgcagcgcatactcaagttgtattcgtctcacttcgacctctcaaacccaaacttcctcataaccctctccccatcctctctaatctttttgagctccctctccctctccctctcttccttctcatactggagcgcaatagccctggcatgtctctcctcacgctcaacccttttcctcgcaaccctctccgcgcgcctcttatgctccaacgtccgctcatcacatctctcagcatcatcgcgcagcgtctcgacctcctcatcggtcaatacccatggcacagacaagacttcaataaggaaccgcaggcgggtatccaggaactgcatttcggcgttcgtatcacgcacaagccagaaccgctcaagatgtaactgcatctgcgagcggaaagttgacagcgtcccttttacccggactagcgttcctggttggagagctgagatgtctatcttgttgtggtctttggaggttacgtgtgttgtttgggtgaggctggtggctgttggcgccgtgagggagaatgaggaccatgctggttttcctgggcctgtggctggagtttcctggctagtggtgccgggatttggtgaggtctgctttagtacggctatttcgattgttgcaccactgctgtcgtctagtattaggattgtgcgtcgtgggacatcagttcgcgccactatgatgcccactaggctaacaaattggattggatggttgttgtagaagaagatgttttggcctgtgggctttgtcagttatgaggcttttgatgcagaaataggcttggttgtgttttggtctgatggaggatattgagtaaaaaagaaggcatatttctgggatattttggagcccgacagagtattggaacacttatagagttcgggtataatgaaaccgaagtctaaacagcctggtggatgtatcgaatgaacttattacgctaacgccgcctcattatcgagcctccgcgctagaggacccggaaatatgcacatgagcactaggtgtgtcgatctgcagggggcaggctcaaaaaaagaaataacatacccacgaagtcactcgattttcggagacgatgcacatcggccgcacccattttcacccaggtaaagtgcgtgggtgacgccttgaagcagaacgcggggtagaatacgaggttctcatggttgactattgtcattggttcatcttttttctcgaagtatgcggaatcaggacttatgaatctcaacttgggaatgtcgatttagggatcaggagtaggcatccgagcatgagttaccgctcttgccgacacctgattctgcctaccacttcccacaccgcctttgtctagaactccccagtagcaagaaagagaccgatgtcattatccaagaagcccttcaaccagcctataatggcactatataattgctggtttctagcatacccacaatctctatagatagatatgcttatctccgtccatcatcctcttcatgggattcctcggcagcgcctcctgccttttcctctcctcagcactgatatcatcaacattagtctccttctcccccaatgcagcccttacctcctcccgcgcattctcatgccccgcaaaagcaacagtcaagatctctctctccaacccaccaacatgctcccactcaatgcccgcctgagttaacatccgacatccctcagactctccaacaaacgtgccaggctccttaaccccaaagtaaaccttatggaccccctcccgtccgccttccctcgtctgcgtgatacgctgcacacacggtgcattcccagacagccgcttcccgcacggctccatggtcacgtacatgacgagcttgcggccgggctcgacggggaggacttcgccgactttgtcgtcggggactttgtgcactgcggcatagttggcgaagcagcattgctctgcatgtgtattgcccgcgagctccattgtgtaccccgtcgagaggatccggtcgtctgtgaaggtggggtcgtcgtctttgcgggatagtaggactgcgccgactcggaagttggtgggtcttgggggggatttttcagctagagagaggcattcttttatgtagggtatgtgaggggaggtgtttgtcgtcatggtgagtgatgccaattgcgattaggctgggtgttcggtgtatgaggggatcaagttgcgctttagatgtaaaatttggattttgaattggattcggttggtccctgtagttctaaatcgaagagagtgaagtggcgctgtcgatgagcttggggtgcttgataaaggcggggagcagcagcaaaatgacgaaatggcccgtcgcgtcgaaatcgcgttccatttctacgaccttgtgcagtcgccacttctattatcaattaaatccaagttcagtgtaatatacctaggtatctaaatcgcactcggttcttcgtctggtgtttgagcgcccaaaaaaagcctgtcgtgtcaccaaaacttgcaatggcgaaaaacacgaaaaacgaacaccatgcctcagacgaagaaatgccgtctgtcgaggaagatctttataaaatcctaggcgtttcatccgatgcaaccccagaagccatcaagaccgcatacaaaaagaacgctttgagacatcatccgggtatgcaaacccacgcaggttcgaaaacagcatgctaatctcagagcagacaaggtgagcgaagaagcccgtgtagacgccaacgcgaagttccaaagaatcgcactggcttacggagtactttccgacgcgcgccgacgaaacgtgtacgaccggaccggcagcacggacgaagcctttagcgaagatggcgacttcaactggatggacttctaccgcgaacagctctcggcgatgctcgactcgcgggcgatctcggacttccagaagaaataccaaaactcagaggaggaaagaaaggacctgctcgccgcgtatgagacgcacaaaggcaatatggatgccatctacgatactgtgatgctgtccaatgtactagacgacgatgaacggttccgtggtattattgaccaggccattgcggatgaggaagtggaggacttcgcgcgatattccaaggagcccgagaagaagaaacagcagcgtgtgaagaaggcgcagaaggaagcgcgagaggcagagaagttgggaaaggagattgaggataagaagaagaagaaagctggggctacgggaaagagctcgaaggctgcggcgaatgaggatgatcttctggcaattatcactaagcgccagcaggatcgcggtgcgggcttccttgctcgtttggaggagaagtatgcgcagcctgggaagaagcgtggtatcgatgatgagccttccgaggaagcatttgctgctgttggggctcggaaggggacaaagcccaaagcgaagaggaccaaggcctgagttagggtctttgtttcctgcattcatgtgtcatgagcgtttgtctattgtataactaggtctaatcggtgtttgtaattgcataccactatatccttcttcttactgacatgcaaaaaagatgtacaaaaatacattccaaaagacatttgtagaaggcgtctgcacgcagccaccgcggctgcagtaagtagcctcatcttccaaggttgggctccttctcccaatctttcctcttagtcccttctttatgttctttttctttcaatctcaattacagatagtgcacaaccatatccagtccgtaactaagggacgtcgacttgattgacttttctggccatttgagctgtcaagctgtccagctattttcttgaattcttcctactcatgcatcacaactaaacctgacatacattcctatcaccgtcataaaacaaggcgacctgctccacattcctcattgcttggcggagttgactgctgagtttccccacagcccggaggcggtgccgccatgtcgcaccacgctggtcgaacttctcccactgaacaactgaaaagtttggatggtcgatctacaatatcaacgacctcaataaaggaaaaaccacctggcctgaaccgtgccctgcagaacctgctgattgccccgcagtctaagagtgcgggcgggacaacctattcgcccagagcaggcggaacccgcagtccagttgagccactggtatcatcgcctttgcgcatcagttattcagatatggcatccgctccaagttcgccggagaggcatgccgcagctcgcgaggttttccctcgtagatcatccgaccaggttgttgacactgtccgctcgactacgggtcgcctcagtactgatgatgatgatgcgaaatctgatgtcactactacttccctagagcagccacacgccaaaaagcgatttttgcaggctagagataggtctcaaagccgcaagggtgtggctgccataatgtctggccgtctcttcccgagaagcttttcccgtggcagagacagagcctcatcacaaggaccttcccagcgtggagcgtctcttgactcccgttctgcttcttcgccggagcggggtcgccccagtctccctagtagtcattctgttcacgttgaaaccttaactcccacctctgttggttcagggaaggggaaatcactgaacatgcacgatgcattcaacaagtcagacgaagcattggctaggccccatggaagtggaagcctccctgattatatcaaacccgctgtggaggagggaggggagcgaatagccaaggatgttttcgatcgtgacaagaacatgattgaaagcagtgaagatgaagccaacgacacttcgagcgatgaagacagcactctggagggtgtacgaggccgtaagaaaaagaaggactcggatatcacatccataacaccaagcgactttgagaaacccaagagtgacgattccaagcagtccgaagaacgtacgttgccttctcaggactatgttaaatatgaaatccattgtactaacctcatattttataggaaaagtttccggagttccaagtgaacgacaggagaagaaaccgcgaaaatctgctttgaaagctgtggtccatccacagaccagtttcgacatccccaccccacgtgttcagtccatcgccggcacaccttacggctcagaggatgaagccgagattggtgacattcatcgtgcccagaagctcagtatttccatgtccgctattgataacggtgtttacaaccgatccatccgaacaattgtccgcggggacttcttaggtccgcaggatcaaggcgatggtagccgtcgtcgccgtcgaaaatacttaatcgcaactgacttgagtgaagagtcggtatatgccctcgagtggactatcgggacggttctgagagatggcgacacgattttcgccatctacgccatgcacgaggactccactactgcggcagcggtgcaggtcggcgagggagctagagtgatgaaagatacaactgctgtcgttggcacccagacgaaagaagccaaccagaattatggatcccgtacaatccttggtcgacttggccctggtactgccagcaagacacattctgttgattcccgagcatcgtcaatcgccgaggcagaacgagtgagggcagttgagactgtatctcagacttgtgtgaagttgctacggaaaacgctcttacaggtccgtattgctgtggaagtgatccactgcaagaatccaaagtctatgattactgaagctgtgagttttttttctccgttctcaaccaccctattatctctggtccatgcttacaatgactctcagattgatgaacttgaacctacactcgttattgttggtgctcgaggtcaaagtgcactgaaggggtgagtgacgatttctaatccgatcttatgctgctggtgacaatactaaccttacttttagtgtccttctcggctcattctccaactatcttctttccaattcctctgtgccagtaatggttgcacgccgaaagctcaagaggcacacgtggaaagacaagctcaagggcactgcacatgtgcgcctatccaataatctaattactccgaagagtctttctcaagccaaagtggattgatctggtgtgctttttttttcatgttactctctggcttgtcttttcactcatcgggtccatgcaaggcgcctatcttgcactgcgtttgaaggcgcattagacctgggttatcaatatctctatttaacgcgtatggataccctacttttcactggctcaggatctcacaatatgatggctctttcttagtttacttctcgttcttaacctgctcttaatttaggtcttcgacattattgcttgtggcgcaatctgctcttaattgcttagacaccttgaataacagtactttgtataatgtagaaaacagatatgttcctgactattgcttcattcacatgtaactatacctttgcgccgggcttcgacccattccaagttgggcttagctgggcctacaagatagggaacgagcacctaaacgccaagacatgacccggcctacgcacctcatcacgtgcaacgtcaccgcccaagctcccccatcgagacagctggaccaaccccccagtcccacctttgctctattccccatccttgcatttttctactctgaatttcgcccgtggaggatcagattcgctatggccgactctattgacccccggatgccctccatcaaaccccggttccgttacaataccatcggaggcattaacggaccgctggttatcctcgacaatgtgagttgacgatgtcctgacaatgaagcgggaactgtatgctaatgataaaattgtcaaacagatcaagtttccccgttataacgagatcgtgtccctgacgctccccgatggcacagagcgcagtggtcaagtgctggaagccagaggtccgttccccacattctgccgttccgactaggagtatgaaagctgactgctatatatacaaataggaaaccgggctgttgttcaggtgcggactaatacctcgtcgctaacatgaaagactttgaattaacgtggctcgtttgtgaattaggtgttcgaaggcacttccggtatcgatgtgaagaaggtacaactatccgttgaaatggtttgaatatgtgctgacatatcgttagaccaaagtcgagtttagcggccacagcttgaaacttggcgtctccgaggacatgttgggtcgaacattcgatggctcaggtcgagctattgataagggtcctaaggtgttagcggaggagtacttagatatcaacggccagcctatcaacccctactcacgagtatgcgcactttcaccgatctaagatggaactacggaaagctgacgaacggataaggtgtaccccgaggagatcatttcgactggtatctccgctatcgatacgatgaactccattgctcgcggacagaagatccctatcttctcggctgccggtcttccacactcggagctagcagcacagatttgccggcaagccagtctagctaagcccactaaggatgttcacgacggccatgaggagaacttctccatcgtcttcgccgccatgggtgttaatatggagacagcccgtttcttcaagcgcgacttcgaggagaacggcagtatggagcgtgtcactctattcctgaacttggccaacgaccctactattgagcgtattattactcctcgtcttgccctgaccaccgccgaatactacgcataccagctcgagaagcatgtcctggttattatgactgacatgtcggcctattgtgatgccctacgtgaagtctctgctgccagagaagaagtccccggtcgtcgtggttaccctggttacatgtacacagatttgtccaccctctacgagcgtgccggacgagtacagggccgtaatggttctattacacagattcccattctgaccatgcctaacgatggtgcgtttcttaagtcacactttcagcgaatacaactaacccataccttcagatatcacccaccccattcccgatttgactggttacattaccgagggccagatctttgttgaccgtcagctggacaaccgcggtatctacccaccaatcaacgtcctgccatctctatcccgtctgatgaagtccgccatcggcgagggccgcacccgcaaggaccactcagatgtgtctaaccagctgtacgccaagtacgccattggtcgtgatgccggtaagcagcccacccttccacatcccacaaacatctctaaccactccaaccagccgccatgaaagccgttgtcggagaagaagccctctcctcggaagataagctctccctagaattcctcgagaagttcgagcgcaccttcatcagccagtctccctacgagtcgcgcaccatcgaagaatccctcgacctcgcctggagcctcctccgcatctaccctagggaactcctcaaccgtatccccaagcgcattctcgacgagttctacgcccgccacgcccgtaagatccctaacaaggatacccgcgataactcgcatgagaacttgatcgacgcatgaggaggtgatgtgtgttgagctgaattctagggcttgcgcatgttgaattaaagtactgttcttgttgtgcggctgttcttatcttttggttgttattttctttctattcttgctcaagcatgatacattatcgaatctatttcaggggctattctggctctataaaatcatgatcggtttgttcatcggttccgtgtgtatagaggtcttttagaagtggtgggtaatagactgctattgttctagaggttaaagatatctattatgaagacagtcccgaaagatgaagaaaaaacaaaagactaaggggatatcaatttttttattttacttttacccaaaaagagtcgccaatcagaacgcttttcccaaaaccatctcgcaatgtagagcataagcatcaaggcatcatgaaacctctctagcaagacagaaccaaaaataaaaatgaagacaatgaaactgtgaaaggtatttcattctatgcaaagatcgaaaagcgctcagaagcgcagatcccagccgatcttagggcccaatcgaggaagctcgtcggcgacctgctggacatccttgtcaccgcgaccactcaggttcagaacaatgttctggcccttgcccattgtcttggcgacttgcatcacaccccagacggcgtgcgaggactccagggcggggatgataccctcgtgttgggcgagggcgcggaatccagcgagggcctggctgtcgtcggcggcgatgaaggtggcgcggttggtatccttccagttgctgagttcggggccgacaccggggtagtcgagaccagcagagattgagtgggtgtctgagatctgcccgtgctcgttctgcaggacgtaggtgcgcacgccgtggaggacaccgtgggagccaccggatagggtggcagagtggcggttggtgtcaatgccgtcaccagcagcctcgacaccgatgagcttgacgcttgggtcattggagaaggggtagaacatgccgactgcgttggaaccaccgccgacacaggcgatgacggcatcggggagtttgccaatctgcgcctgcatctgctccttggtttcgttgccgatcacggactggaaggtgcggacgatggtggggaatgggtgggggccgatggcggagccgatgatgtagtgggtggtgtcgagttcgacgacccaggcgcggagagcctcgttgaccgcatcacgaagagtgcggcttccagcctcgacggcaatgacggaggcaccgaggagcttcatgcggaagacattgagaccctggcgacgcacatcttcagcacccatgaagacggtacactgcatgccgaacttggcgcagactgtggcggtagcaacaccgtgctggccagcaccggtctcagcaataatgcgggtcttgcccaggcgacgggcaatcaaaatctgtccaagagcattgttgatcttgtgacttccagtgtggttaagatcctcgcgcttcaaccagatgttggcgccgccaacgtggtcggtcaaacgctgggccatgtgcaggctgctgggacggcccatataggggtagtaggagcggaattcttcccagaaattgggatcattgttggcaatattgaagccgtgctcgagctcggccaagcaatccataagggactcggggacatactgtccaccgaactcaccgaagcgcgagggctgggcagatgcatcctttgtgacattgagggcctcgagctggtcggcgagaccaggtccggcgggggtgtcggaatcggtgatcactttagtaggttgaacctgagcagagggctgggccttctgaatggcctcgagaacattgatctcgtgagtcagagcaccggtggcatcacgctcacgtttgcgtccagtgatgctggaaaggtactcctcggcagccttggcagcctgcccagcaggggccttaccaacgcaagtgataatttggctgccaatgacaacaccctcagcctgctcctggacggacaggaagtgctcacgggtgctgacaccgaatcccaatgcagcaggaacgttgccggagtattcgtggacgcggtgcagaagctcggggatgtttgcgctcaatgaaccagtggcaccggtcacacccatgcgggagacgacatagataaagctgtctgcgatcttgcagaggagacgcatgcgagcatcagaagtggcaggggcgataagggggacgtaggagagactgaaattgagtaagcatgctgtataatcatagacaaatgataaagatttgaagagtaaaaatcaaggaactcacccagcgcttgagcaaaggtcacggaaacggacagcctcctccgggggcaagtcaaccatgataaaaccattgacaccagcctccttgcaatcacggagcatacgctcctcaccgtacttaaggacagggttgaagtaacccatgagcatcagcggggtctgcagaccgcggctgcgggcagtgcggacaagctcaaggacggtagtgagggtaacaccattctcaagagcctttgtgttagcggtctgaatggtggggccatcggcgatgggatctgtgaacggaatgccaagctcgatgatatctgtgatatgagaccgaatgttagtaaaggtcatccctttgatcaactttcactttgggttgaattaccggcgccgccgttctcaagaccgaggagaatatcaacggcctcctcaacggtggggtatcctgcggtaatataggccacaagggctgcacggttctgtgccttgcacttcgcgaaggtctgcttgatagcttccatgatgcagggtaatgtgaaagtggcggggcaaaagagtgtggtgagaaggaagaagagaagaggccaatgggaggcaaacgatccctatatatacgttcagagatgggatgcgttacacgttaattgttaggtcagggatggggtgagatgttataaaaaagcaaacgatctgtatgagtcaaatggaattgttctttttagaggccggtttcgctgggccccgcgtgtcacgtgccttgataagatagtgagtgtcacggtttaatgagccttttcccgcctttttctgccagctaactaggaagagagcgagggtatgagaagaaaatgttatctaaaaagatttctaataagacttatatcaaaaagacatgagaatgttgcataagccgctgactattcctgtacatagtagggatgatgtagggctgagatttccacgtgatatgctctacatccacattctacaagagaaggaaaagtgaaagaaatttcatctgcaatgtaaaaaaacttttactcggaataggtagattaaggtagaagataaggataatgaacggcccaaccgttcaggtcccaaacgccgtaacaatgcagtaggtaggtagtaagtgacaacaaccctcagctgaaataacaagaagtggtaagtaccgaatgaactccagccaaaattttcaaacagagaagtgaaaatcaaatagggaccatgggaggaagacccgagaccacgaagagaacttcatagtgtcagagatcctccacccaagaaccccgtccaaaaagcaccaagcaattggatgaaatggacaaaaccgccaagattcccaaaaaagaaacccaaagtctatcccatttccaatccaagaataacccgcgaatgcaaaaggaatgacaagcaagcgcccgctatgctgaatggtagtacaaaagcccagaatgtatgttttgtgcgcaaaaaagggagtggaagccacaatgcccggcatgataatatgcaacccaaggaaggaatgaataagacaccgtatagatgcgaggaagtctcaagtaagacaatgtccaaaatgtcaaaaaaatcaatcgcaggaatgcaaaggccgcatgtttgggtgtatggttgagggcatgaggcatcataatgtaatgtaaggacggacgtgaatcatgatcaaaatgtgggatgcgaggttcggcagataaaatgtcttttgataccttttcaggtggaaagagaccttgtatcagacggacggcaacccggtgtctgggcttggtaaggagcgacgtgaaaaggaaaatcgtatcttcaaaaaggcggaggggaagtatgaaaaatagaatggaagaaaaacgcagcaagaaatcagataggaggaccagccagcagggggatcagtggccgccgtgggcggtgtcgtgcacggagtacacgggatccaagtaggtatagcacccgccatttcctggtgcaccggtgtgaggagtgttgtggccgagagggtgcatgtcccaagatgctcgcggagccgcgggtggcagaccgttctgatggctcatggctggatacgagtatgctccagcagatgtatatggctgggacactgcgctcatagaccggatattgggtgccgaagacaggtgggaggagtggtctgcctgcgagtaggtctgcacgggcataccatggtagctgtggccagcaccactgtcggagatagactggggggagttggcagtgtgaggctcggtgccggaatccgaaccagtgccatgactggcatggctggtataggtggtggtcattggtgtggggatggcacttgcggttgaggaatagctggcagacttgatagaagagaagattagtaatttgtcacaatcagccgataagtttcaacatacgtatttcccaatgatcttcttcagtgcctggctcaggaccttccaagggaacaccttgacatccttctcgatattgcggggcttgggggcggggaagcccatgataaccttgaagaagtcttcgctctcgaccttggccttggagacggtgagggggcggaatccctccaagttgcgacggatccgattcttctcttcaacagtgaagcgcacagccacgagggactcgagcagatagatggtgtcgacactcgttacgtagcactcattcttgtcctcccatgaaatgcagctaatgcagatactgttgggggcgcgatcgtcgggagaaacagccttgaactcgccctggatggtgctgccagtttgagagcgggtgaattgcaccaggcgacgtcggcacgcgcgttcctcctttgtccagccttgtgtcatagtatcgagatcaccgttcaacttgaggatagccttggtgggatatatggcatagggattgaaggctgggttgtggggcatgctgtgcgtttgcatggtggaggtacggatcaaagtgggatttgaaggaccacgctgggggggacctttgtgctgaggaacatgtgtcaaggcgagaccgttccgagcatcattgctcacagagacgaaagaggggctccaagccggggtgataggggaagggacacggagggcgggctgggaggcggcagatacagaagagtaatggccggagccagtctggggagaggatgcagagtgatatggcgcgacaaatccaaccatggcgggaagaggctggaggtaaggcgagtaggacgctgatacagagcggccgtggtagccctcgtggtgctcaaccttggggatcacggatccgttgtgtcgtttggcagatgccacaggagcatcagagtatgaaaacttccgcttgcgggaatcccctgatggcgaagggtgggaagcttgctcataagtgtacacaccaacctggagagaagtggcgggacagtcatcttgggtctccatcaagacggacagaggaacagcaaaagatggggatccagtagacaagaatgcaggcacgtcagccgagagaccgtactggaacgcagagtcctggaatccgaggaaatgtagaagcgattcacacttcttggagccaaaaaccacatacaaagctgcgtatgaggaagcgtggaggtcataggggcactggatctggaccatcaccctagttccctcacttccccgctgggggctgtatgtcacaatttcgggtagctgacggtggcgtgcacccatcatgggcgactgagactcttcgtacgagctagcgtactcgttgggcagatacggaacacagtccgagatctgacttgcctgatcggccataggcgaggggaccatggcggtcgtcacataaggcgattggccgtagttcgagtaagaggcagcatcatgcaaagatcgagtggaaccgtaatctgtgtttggtctcagcacacgggatgttccgtcgcaaaccaagttcttcagctgcaacgtacctgtgatggcgccggcaacgggcttctggaaagcagacatggacaatatgggctcggacttggcccacgggccgtctgaaaatgcaccgataaactgtgatccttctgagtccgacagatccaacgactcgccgagtatgagaggcgtttgaaaatccgggtcgaactgtgacggaagaagaaacaggtcagcgggaaggtttcttatgcacacgggaagacagaatgcagtagaagattcaaacagaatgctatgctggaacacctatgcaaaacatgcgggcatccacaagagacaagtccaaagttaggctgggaatcttaccaaaacaccgtgtgtcttcgaataagccagcttgaagatgttgcagcgagtgcaacgagacagaacctcttgaagcgaatgactgggaatttattccaaacgattgtagggtcgaaaagcacaagcaagaatggagtgctctccgagacagaacgagcgacgagatgaagctgctgtcggtctcacaaaaatagcggcaacaaaaggcctcgaatcaccatccagcaatcaacgactaatgctgaaactaggaacggctggctgcagaaatcgactcagatctcgaccgtcgtgcccgacagttcataaagagaagccgaagaactagtcgcttgacaggagctgtccaagaaaggtccaccgccaattgggacgggagagccgagattggtcggaggatgacgagcaacgagcgtggactggcgaggtttcgcttttctttatttccttgatccgtgaggtgtttcgggaaagactttcagcagattgggccacgatgaagcagatgcagatgataggctactcaattaatgagtatacgagaacgttttcagactataggaatcggatgggtgcatagggggaatgaactcaccgagatgaatcaaagtgaaatagaaaaggaagctctgatgtgaaaccaaattcggccgttgactatcccagataatatgcaagatccgagggtcgtcaaacctgaagagaaagctaatgtcaacaacaaacacttgaccagagcgggacggggaagccatccgacggctttgacaactatcgtcatttccagtcgttggtatagttcagcgaatacaaattgcggctgcaaggagatggcataaaagatcaagagccgaaagaggaagtatgcaaggcacgaggggcacaagtgagaccgtgggcaaagggaggggtgcacatagatactaaccttaagctgataaagcgatctgcctgaatagttcctttccgggtaaccaatatttcctaatggctctgagaccctgccaaacagaggcgattccgcaagctttctggacccagtgtcttccgagacagtcaagcgatggttggatttccgtgtcctgtcgaatatcccgatatccagtgggtagtttcgcctgtcgcaagtacaaaagcccgaagcgaatcctttttttttttttggtttcgaatgttggaggttcaactgacaccgcggagcaaacgggatctacagagatatcgcgcaaacgccgggcaagtaacactttcttcgtccccttagatccaaatcggagtggttcgaatataaaaaagaattggcgaaaattccggggttcccaaaagaattaaatattaagtcgagttataattccaataaacgtagcgaacgtggttctcgtagcggcaggtaagcgagcgtaagagcgaacgtggtgagcgaatgtgcgacttagcaagtcataataaatttcaaagggggatggaaagtgggatgcaaggaagatgggaccagaagggttaaaagcaacgattgaggattatacggaatattattattagcagtcagaacagagcagggtcgtccctaaactgtatagggccaacttgtggggggagggattttgtttttttattttttattttgatttgggttctttttattctttttattcttttattcttttgcggattagaggattcataattattattaataaaccgaaaattcaattagcagactaaaagactagtgggaaatcctagcgggggatgcacagagggtattgggtattattacctttgtatgtaggtacatctagatgtatacctacctacctatgtccttgtacatcttttcccgtcacacagtctagggttagaatctcgagtctcgaatactcgaaatatcagaaaacaagggcggagcatacacaaacgacatgaccagtgtgtcggaaaccactagaagccgacttgttatgctttccgagatgtccgaccaagtccgatccacctggttttcttaagataggactagggtgttcaccaacgatctgggacttgctccaaccttctatttgcagaaccttgaattgatcattcaacaggactatagcggtgcatcacgtcggggacggaagaattggaacgtggtgaggttcggaataaacaccaatctggcggcctgcgccactagcaaaagaaaaaaaagtggggagtcgtccagcatgtgggagaaaaaaatattttatatacagaagaggaaggacgttaccatctacatgaccggttaccttgtgtgtatgttgtatgttgtatgttgcatatgtgtatgtgctgtttcctgagcatagcctctttgttagtactgtaaccctagacatccatgtcgaggtcaggtcggtccaatcagggttggggtctataacaaggactctctccgaagccctcctctcttactatatccctgccaatcacgaagcttcaccggtaaccctgttagctccctacttcagcttcgggtacttttccattcgagccctttttatcttttagtcttttctttccaagcatctccttacgcccacccttgggccatgccgcaagtggaaaaagagacccttcctcttttctccagatgctccactcacgatctccccaacggaatagggtccgtcacgatcgtacggagtacatagtacatacatctcgtgtcgtcatgccgggcaatatgacaattcacatttcccgtttcctgacacgaggctgcatgtaagtatgatgtgtactcccttaccaaagtccccggataattcccgatcgtcttttccacctgatgcattttggtaaatgtcagaaatatagaaatagacagcataccaaggatatcggacggagtactccgtaaatcaggaaaggataaatatcggattacacttaccttggtcatccaagctcgggttttccaacacgagtctaagtttagcacaccttgcattttcaggtgactcggtggcctgactatgcaagggtcctgcccggtgattggttctctgatcttccccctagacccgatcgggctatcactcttggacatccgtgctcccctcgaggtaacgggaccgttccattatcagctgcttctgcactgtcaccttatccgggactcgtatatttagatcggcttcgtattgagatcggcttcgtattgaggatgtgatatgatgtcgatattctgcatgtacatgtactaggagtcgtgtacccaattcccattccaacggctcccggcccacgggctatctccaatgcgcaggagatcattagtgtttgaataattacccgatgcagcacgtcgaggtctgcagttccgtaggaacgtcaaccatgctattgttacagatgcgatgcagatgcagccgcggacgcagacgcagacacagatgttgaaaatagaataaatctccgtacgggtttcttgtttgtttcttgattctatttaatcctaggtggcctctatgagatcatagactgaagggctggatctgatatatcgacattattgacataagtttatttaggtgttgctgactccgacataaataaaagaacactaaccctaaccgggacataaacggtcggatgcacacctccgactattatttcgtgcagctccagccacccacgatgtaggaaagggataaaaaggggcagataaaaactatttgttttgaagcgcgttacctatcgataagatatgcactcgactccgcgattttgccacgttgaagacgtcccgaggtacgatgtactccgtactccgtgctcggtggacactacggagtacggagtatgcgattttatgtatccgattttatgaccaaatcaaggcatcactcaaaattcggtaatggggctcttgagaaatacaatacaccagtggagcgcgcaatgatcaccaatctgcccaagaagcttcaatcggatcagcgatcgcgtccaaaacagtcaacggcttcttcaggcatcttcggttaacagattagattattgtctgatgccttccttcttcccttgccattcgtcaccggatagttaataatcttccctacatgcaaactgtatcaatgtccatgttcgtgttcctcaactcccaaccaccccaaccaccccgaatcactatcaaacagagcaaggagcgcctcatccaagggaccaatctaatcaatcccaatcatccctttagaaattctaaaaaccaatggataatcttattagtttgtaacggaaacatttctccaattggcgtttgcactttaatcggccaatcttcggaaggaatatcagtctccacctcgaaacccaacccccccgaacacccgaaaaggaaaaaaacgcgaaaagcctgtacgaattaaacaccaatgcccaaaagcagagcttgtatcccgactgatcaatcccgtctcttggctagtgtgtcaagcaataatttggatcttccatgtccttggaaccttccaaagtaagaagcggatcaccatatccccagttcggacttgcaaccttgtttgaagccgccaatgctgtacgcgacaatcctattggcaggtacacgccccatccatatccatgatgatactattgaccgggtggatatccactactccgtacctagggcttcgggctctccggttcctgcttccatcttttattgtttattattctgcttattattctgcctattggcaaaccacggatgcctatcaaacgttaattggagactattacatactagattattccgcgcgaacgacatgctacccatatgctttagatcgacgtttaaccctaatcccttgtatactaccggttaaaagggttgaacgttacttcttacccacttaccctttctagggatccaacattgggaaatatgcaggtacagacgcactattgcctgcgcgtctacttcctatccgccaatattatgtacgtggtcgcgccactcgtgcctgtctgtgtatgtatgtgtgtgtgtgcctgtcttgcgtgtgggggggggcaccgagcacgggttgaggaagattattgaattattgggtaaggatcttcatcatcgatcccttcgagggagaagtccagggagaagtccagggagatgactatcaaccttgctgtatagtaggatagggattagtgtgcgggccacggggaagcataccctcggagtgaaacatcctcagagacactgacggctcggtctctctttgccctggttcaccacccttacattttatttcagctcctcctggttctgttcgtgaaggagacaaacggcaacgatcctcggtttttttaaccggtgtcttgatggggtggaagatcactggcctacccttgttcgcatcagagtttagtctgcaccacagctcggaggaatgtgacgtggacccgctttgtcttggggtggttcgactattcactcacatctctgtctgttctggagagaatatcggtgttggtatctttattctacgtgaagggagaagagaaaagacaaagaccggcttttggtgttaggcctactggagttggacgggaatcagctgtcacccggctatccgtgacgaatggcagatgaaaatcggcaaatcaccactcggcatcgactgcatgtctttggggactcttttctcttttttttttgcccctgcaacgaggaccttctcctacagggcagcctcttcgtcgatccccccatcgcagagagggaggtgtgaatccttgacatcagctccatatcgatggccactcatgagcggttatttctcagtgggaactgccgttcctagctttaaccttctttggcccctgtcggagaagaagtggcttccaggggagtacgcaatttgtacaaagtacgtacggaatgcccgacaaatgaatacacccgaacttaggtgttaatggggttcgaccccttcccctaggatacttagcgcctcacgactattcacggatgtcacagataaaaaggaggttaacggtttcaggaagggagctaaaagctgacagatgccgcttcggttagtgtacggctcggcagtattcgcccacactttcctctgttccccggtagcatctcaaaaatgagacagtggcggaacaagatgatcatagacttgcggtcaaaactgacagcaggaatcagcctcacctttgatattgatatttgtcacgctcccattttcaaagaagtgaaagagggctggctaacaggtatctctatcaccgatgctgcttcccgtagtatctgaatcgaacctattcatctcaagctcgcatgtctcagcgtggagagaataattagaagattggaagactgccaagcatgtcttactcggtttcggggactctttactatttgcaaaatgtctttagcatgaccaggaagtgtgtcacgctaacactgttgatctttacccactggcgtcgttattcgttgatttgtatgagaggagcctctgtccggggacgctagatttgacgcgagatcccgtgtcctttgagttttgcttattttttccatctcgtatcaagaacttgagtgcatccactcatattagacttattttagctctctaataacgtgtagcttcctaggcgctatagccgagtcaggggttgcgagacagatcaccatgacgatccagttcggattagaagcttgggcggaatgggatcggggagatgttgaatgtactccgtacgattatagcttattcgtatttgcgatattacatggatctgatgggtgggagatcgtagtacatcaaagctctgaactttattgtttttaagttatgaaaaatggctagtgtgaatgatggtaggactaaatatatatcggttgttatagagcaatatatagagtatatatcaccacaatgcaacagcagataacttccgattgcttcaccgcgccaaacgccatgataacaatcctcaccaaaacccaatcgaatcgtgattcgaaaccatctaagtcgaagtacggtttcaggttgatggaaccgacctaatctgtagcgtgaaacactttatttatacttcgacatacaagtttagcttgatgtttcaacccactttaagctaggaactaaaataaggaccttcagagtcgtttataacattgacgctataatatactccataactagcagtcggttctccggacatctaccacacggtagagatatatccatgaagtgggggggggcgtaaagaaagtcccaccaatcagagcacggagaatgaattttcaatcccgggatcactctcttcccgaggtccgaacttttttagcagcacttgtatccaattttggcagcgcattgcgtaccgaatcgagttcgttgcttcactaatagccccagtcaaccgctcctctttggtcaattggtagactctaccctggttccgacgtaagtaaagtgcacggtctatttatccatcgctttccactttttttccatgctacactgtccccacttgaccacgttgagtgcatatttagtccgtgaatgccaagataggcaacactctttagtgcaagaaccaaggtcggcttatcccattaaccttttgttaagcttaatctatattggtagcgaccttccatctatggtacatgatgtacgagtactacatcgtatatctctatcttggatatgccaatataaaagacctgttttcttacttcgctccactgacgtatctccaccgaattagatccacaaaggcgcaagagtgaaaacaagaatagcaactaacttcgtcgcaccaagcacatccatgattagtcaacataaacatatctgtggggaatggagagcttggcagccggaaggggcatagtccactagcaaagcgaccggaagaacgtcggaagaacgtcgaagcctaacccaacccgagtcgaaaaacgccctctaaaaaaaacaccccaagcccacccaaaccacagcaaaagacccttcggaacatacccgagtcggggggagttggagaccctgaaaagcggtccacgaggttgagctggagagcgttgcgctaaccttgccaagcccaaccacccatgcggggcggtatacataccgcttagggctgtctcactttttagttcgcacttatcatttggcatcgagcttagtgtcccccgtgtggtgtatggactccataatagatgctattattagcgagcgggaagattgttgtgttactactactccgtacaaccgactgaatttcccgttgactgcctgatgcagcatgcgggccgattgcgttttgagatcgtggacgtgaggtttgcatacggtatacagcatattgcttattgttggctgttcagctgttcgactagaacaacgccctgctagaagtaccggagggcttaggacccctcaaagcaattgtttggtttgtcgattagagttatcggtgaatattagggtttgatttcgatgcaacggtagtgttgcagtctgttgcccgatcggttgcaagtacgtcgatcgctgaggctgctagttcatggtacgattagggttatttttttagagtcatgccgtgcgtcggggtatgaccaaaaagacactgcattctgacggctaacgataataatagactcggcttctatgcggcaagctgaaatgagacacgatgatcacaaccgcacggggcagaacaaggtcggaacacagagcaatgacccacaaacttctagaaatagcagatctctaaacagctaagcagtatcgtacccactaaacaatccctctttggacgattcgcccgtaggaacagcaaaagaaaagcaaacgcggcgaggccgaaggaatcctctagaagatggaagcgctctcgtagacggtgcggtcgtagcagacggggaaaagcttagaccagaaagcgtacagctcgggtctgtcttcccgcacctcgaccagccatttggcgaatgcgaactcggtttggaagggattcggacttcgataaggagcgacctgatccatgttagcgcgggactagctaggtacctggagtcaagaccatggcgataactcacctctgaatatctctgcagcgcctgatgatacttctctgacagaccgagcttacgaagagtcggcatgcggattcccttcgccgcgatgctatatgcatggttgagattctcgcgttcgacaaatgagaactctccaatcacgacgcctcctggcagcttcttatgctgatgggcgtgagcaacttcgatcagacgggtgagcaagtcggcttcccagttctcgaaaagaggatggcggaattctttgatgtgtcgctggagcaaccacagttcacgcttcagacggactgtattggcttgcagttttgcgactcttcgttcgatgtgcttgttgagggtttgcagggcatagtgagtggcgtcgaaggactttattgactgttagtacattccataggatcgatgtttccccaatgcggcaatacctggaaagtatcctcgtcccatgaatcttctggggcacgatgggagtctgatatacggggcacatggccatttccgcgagaaacggagcgagagactcgtcgagtggagatgtgatccctcttggagttcatagctggggtggaatcggaaatgaatggaagaattgttatacaatgagcgaattcgagattcagttactcgatttgattataataagtgaggatgaaatataagagtggcgatggcatgctgaagatgagaataagtaacaaattgtgacgcggtgatgcgtgaagtggcccagggggaaggcacgaagaacactggtgattgctgcaaaatatctcaattgatatgtatcataggtgtatagacagccatttaggcatcatgaattcatgggaatcgtagcaataatatttcaaagcttactgcccgcagacttgccaaactcaatcaccagtttgccgaattgtgtgcccttcttcatatcttcgaacagctcgtcgattgcggacaagtcatctagctcggtctgcagaactcgcgacaccacaggtcggatcttcttagccttgacgaactcaatcatctccttgaactccttccgggagcccatcgtggtgccgcggacgtcgatattcttgaggacagcagtcatggtgaatggcatcttaggagacacagtcattccatagatagagaggacgccgccggccttaaaatgtgagtactttcatctgttattgaatgtatatcccgttgtcgcactcaccttgagtaacttgacagacttctcaatagaatcaccaccggcaccatcaatgatggcatcgaagtttctcttcccagctgggagcatacccaacagcttcttttcccagccatcttccttataactgacaccaccggtcgcacctagctcaacggccttttgaatcttctcctggctcgagctcgtcacaaagacatacgcacctctggcaacagcaaatcgtagcaccatcagagccacacctccaccaatgccagtaatcaagacagcagcaccattcccagagttcctctcaccagccttggtaatcagagctctccagcccgtcaagcccgtcaggggcagagccgcagcctcagcatcagagagatactcaggggcctcctcgacctccgagtactcgatggtaatatattcctgcaatgtccccttatccaaaaccttggtacctcccataattcggtacccagcaggatcctccgggccatcaggcgaatccttccagccagcaccgggattcaagatcacccgcttgccctgccattgctctgggctggggacattcgggccagtgccgacaacgataccaactccatctgcgagcagggggacatcgaaggtcaagccggggtagaggtgttggcggaggaagaggtcgcggtggttgagcgccgcggcagtcagtttcaccaatagctcacccccttgcggggaaggcttaggcaccgttcgtagggcgagcgggtagtagacttggcctggcttgccgggcttgccgtcaattggagatatgtaaattgctttggacattttggatgcgatggattgatgatatcaaaaataaactaataaactgaccttgactcaaatcggggcgctcatgcggggatgcttcaatgcttatcgatagccgaggtttctttgatttcttcgattacacgcctgggcccgaatgtccgagactatatgtcggacgattgatggaaattggaaacctgtatctatatactctgatagagttcagaacgcgaagctcgaattgaaacaaatcgtaatcaaaagcaacgagattcatagtgttttctcctgacgtcacagcgcttagggctatttttgtagctgctgtactatagcctttcacagtctttacattgtctttgtgtgctgcatatttcgctagtatatcaggagagctagtttagaatatttgagatctgctatccgttgttggttttgcatctcccgggaatatatattgtagctggcaccgaaatatcaagaatcattaatcatccccttctctatgcgatagtagaattcatgctatgtttgatgaagttattgactacataaatgagagggcttagaccttgactataaaacagagattacaataatgccaaaggaaatgtcagatttgaaatacaatatcaatttgtctatgagcgtctcaataaatcaaaaaccgtacgtcagtcacgagaagaacagtaggagataacctgggcctctgaggaaatgagagaaattccaacaaagctccatcaatggcaacagacaggaaaggagaaagcagcaagagaaaacatgaaaaaagtatgagtcgtccttctattgaaatcaaataaaaccaccgagccactgagctgagactgttcacttcctcccgcaaacccagccaagtccacactcgaatctcggacgacagcggtgataaaaagtacaatgtctctcgtccacatccctatcatggccaggcatggcctgaatagaggtctcagaagcagcgtcataatcataagtatagtacccagagttatcggcatggaacccatccacgtggaaacggccatagtgctgaacatcaggcctggaagacgtacgcttggatgaaggcactggctttgggggaggcgtcttgttgggaggagaagcagaccgtctgtaagtgtattttgggtctgatttgacatccaagctgtggcgggacttttcactcgaccggggaaagcgcgttggaggtggcgtcggtctcggcactggcgaaggcacaggcatataagctcggcaggattctgggtggctttcgcaataagatgctttgcgacagtggtgttgaactactggaccggagcgtggtgctgtggtgaatctctgagctgacatggcaggtctgttgggacggggtgcatgggcctcgcattggcatttctccacctgcggatgatgctctggttcacgtttggaggtgcggtggccgctgcggcgtcttctgggtggttcgtagtctgaaaaatcactgctgttcggagttgtgggacgtgtgtcgttggagcgacgctcgcgtcttgttgagtgacggttatcatatcgttttgtggctgattcggagctagaatagtcgctgctgcttggtgtgatcgggcttgtttcgtgcgagtgacgttcacaccgattgtcgcaggagcagggtatttcctccacctgcggaggggatccaacctcgcgtctgatagtatggcatcccccacagcatactacctccacctcataaatagaggagtcagtgttggccggggatggggagcgtgtcctgtgggagtgaatcgcgcatgtgctgctgcaggtgcaagatgccttttctggaatgggagatggcgatgggcatcgactgtgggcacaaggttccatctcaggtccgtaacgaactagcctgattcgcccgcttcgagaaagtctcttgtccattggctcgccagcgaagtaccagccgaattctgtattgttgggtttggatcggccagtgaatctggaccgtctcatcttcttcgatcaaagacgacgagcactgggatagtggagacacaaaagagaaaatgatctttgttatgcaaaaaagcttatagttcatagaaacctgactggattgtcttggggcgaaagaaccgtaaagagggaattgccggagagggggatgccatttttatagagctttgataacatctgtgaagctccaagactgagctcatcatatcatagacattcattatgtcgttttgcgccgtctctatgttactcctaaagtgagcaaatctcagacagcattgtctggtgcagaatgaagcatcaaaggacaaacgggaacagtagatgtctacaaagggcgacacaatgatctagccctattgacaggcacaacagaggatgatattttgaatccaaccggatgtcagcccgaatcgaaagacataagaccgttgaacctttgcaagccagtgtatgtttgcccagcattgcagaggttgggtagaaagggatagcattagatgcatttcaacctcctctattgcatttgtgggacaactagactcctttgtattcctagacaaagcaccaaaccaatccctaactgtcaactgtttgaaaaacagctgaactccaatcaaaagaggagcgtggcttttgtggagaacacacgtctattcttttgtttccacgtctctctgtttgcgtcaagccacctaactgtatacgtacttgctagctatagtctttttgggttagggaaaattagcaatcaggcttcaaattcaccctaattgtctgaaaacaccatcatcgtctcaaacgtctcttttctttaatacacaggattgggcacaatggtgtagaacaaggtagaagatacattgggcagagtatgcagacacaatgttgtgcgtgtatcggatacctgcgcttggcggtatgtaatgatagctctacaaatacgctagcctcaccactcttagacggcaaatcacgcgaccgctagtaatctaataccatgtatttacaacaaggcacaaatattgccacggccaccgcttaatcatttttgctctaggaaacttcccaagcgaaatcgaaactcggtctctctctttctcgaccttgttagtctggcgctcgcatctctgcattacctctctcacagctctctacatcttcgattgactagctcctagctgtcatattccaactctacaccaattttccaatctcgtgtcttgcaacctatccgttcgcatcacacattctcttgcaagcccgccacaggtttcgcgataactatctcagaatcggtttttacgtgggggatcaacatccgaccatacaagcctctttaccacaatgcctacaccacttccatctagtttcgcttcggccgctgccggcaacacccaggaccccagccggaggggggatggttcgactagcggagaatggtacgcagccactgttttgccttttcaaaaactgctccattagctgttgctcaccaggctcggttcaatatcattgcttgatgctgtgaccatcaatgttttgagctcaagatatccgatgctaaccttcaatgcctactaggtcccgaaaccgcatgaatggagctacgcagaccttccgccgtccttctgttgctactactccctctcaccaccgggatagtagccagcctgcatctgcctcgacacccacggccggcggcgcgtacatccccccacacctgagctcaaatacttctagcattgcacggaatggggacgcccgatactccaaggatcaacttctagagctgtataaatcgcagcgggaggaggggaccttgagtaagaacgtggaggaatacttcgtggccgactgggatccccacaccgtgtcagctcctgtgaatggagcatgggggaagcgggatgaccacaagaacaactccgcagggcccgaggtttgctgggatcacggtggccaggtggagcccctgggaatcacgggtatgacggaggatgagagagaggtttgtgttgtgccatgcgttcgggtctgagtgagtggtcttgctaaaaagaattccgaatagatgttcgccgcttcagtcaactctcctctgaagccacccccaacaaacgccgcgaaggaaaacgttatcccagggaccggaggtcgcaagtcttcgatctcctaccctcagggccatatcaataactacgccacctcctccccaaccgccggtcgcccgggtccccgacgccgagaaacgggagaatcaatcggcaaccctatgtctcctaccggttccagctcccgatttttccgcgatgaggccaatacctctacccctccgccggccctactgcgccgcaaaactgatttccgagaatcaaacccgaaggtggatgagaaggccaaggatagcagggacgaccctgcctctccctttagctctttgaaacgcagctccacaaatccaatcaatacgggcgttggtggaccgaactctccctggggttcggcctcgcataatgccaatttctctccgatgggtgcctttggagctttctctcttggttccggctctggctctggcactcccacgaccgaaaagaaacccggatacggaagtctccgtggagaaagcagattcaaggggttgctgtccaaggatagctccgaagatattgccggttccgctaaggaaaagcccatgggcaaccttgaacgtcttgctgaaaatgacagtgatgcgcgttcgcagtcgccctggggagatgctgtcaagactcgcgccaaccgaagcgaaactaatccgttcgacgagcctcgcagtggcagcgctgctcttggtgggtctcaggatgttgaaggtcctcctcagtctgatctcgggtttggcgcattcggcatgacctcgagcattcccggattccgggagttgatgcaaagccaggagaactcgcggaacccaactcccagcctactccagggccacgagccaaatagtccaactaacactaatccttaccagagcccgcatggtgatcgtcatggtgaacgccaggaacccgaagatgtcgacactgacggatcggatattcagcctgcccagcatcccggaattagcggacttcgggatcattccaacccattcggcgcgatgagacgggctggctcagggatcgatcttcctactgtggaccgcagccagaactccagtgtcaacgccaaccgcactttctctggtctcggtggtctcggtggtctgtctaccctaggcggagcgtcaacttggtcatctggggctgctgtcggcactcccactcgtgagcgttctgcatttgttggtggtttcggtgaccccatatttggctctatgggcgatctccagtcccctagcttgtcaaccctaggtggaggtggtctatttagccctcacgccggtatgactggcactggaagcatcggccgatcaagcaaactcggtgccctcttctcttccatgcaggacgagcaaggaaggcccggctctgtgggcctagatggactcgacccttcgcaaggcgacaaggcaggtcaagcaagccaccatggctcaacgcctacttcgcaaacacccgtctcggccgttggctctattccaaaccttgctggtcatgacattccttcgagtcaaactcctggcgcaggcattcctgcttctcagcagcgtaccatggttatgccggataggatgcgttggatctaccgggatccgcaaggcaatatccagggcccgtggactgggcttgagatgcatgattggttcaaggcgggcttcttcagccctgacttgcaaatcaagaagctcgaggacaccgaatttgagcccttagctcagctagtgagacgcattgggaactcacgcgaacctttccttgtgcctcagattggccttcctcatggcccggaaccgacagttgcccagtggactaataccaccgccggatctgctcagcctcccttcccgggtagtttcccaagcttcggcaccaccttgacagccgagcagcaaaatgcgctcgaacgacgcaagcaggaagaacagtacctgatggctcgacagaaggaacacttagctcaacagcaggccattatgaagcagatggctcctcctggtgctccctcatcctcgctgaacccttcgctgcagcaccagtctagcgcacatagcctccaaagccagcctagcttctcaagcatcacttcacccgttggctaccagccatccccgatccaagctcccatgcaacagcagtctcaaggtatccctggattcttcgatggtgttgcaccgaggcagggcggtttgaacgtgggacccggaatgctgggaacggatttcggcaaccaggatcagctccctgctctacttgatcgcctgaatatcagccgccaggatccatttgcctttggcagtgctggttcattctctggccgccagcccgataactttttgcagtcccagcaggttactcaaatgcttcaggatcgtgctcagcttcaacaagagcaagaggactttgacaaggctcatgaagatgatccatttgatcagcacgctcgcgaggagcgtcttcgtcagttccatgccttgcgggcccaggaaggcgagatgggcatgcgcaccgctgaaggcctgcctacccaccctgccgccgcatctcggcaactcgaagcagaggttgcggccgagatggaggaggcagctcaacagttgaccgactctgttaccggcgctgagcctctcactctttctcagcaagtccacaaggctgcttctgcccaacgccagcagcaggaacatgaacatagccatggccctcctgaatcggtctggggaaacaaggttgaccacgctatgccccaacctttccctcccccaccctccgcgtcgcctctccctgcacctaccgcccagcgtaaccgccaaaacgtcgccgagtctctggctaccgggtcccgctcccagactcaaactcccgttgacgctgcacctacctccatcgcaccatgggccaaggaggcaaatgacttgcccaagggcccctctctcaaggagatccaggaagccgaggctcgtactgccgcccaacgcgaggaagtcgccgctgcggcacgccgtgcccaattcctcgcagagcaagagcgtctcagccaagcgcaggcacaggcagctcctgggctcccttcgtctgccaactgggctagcgctggatctccggccacccctgcctcggctgggtctccttgggccaacaagacccaaccaacacccacggcaactaccgctaagaagactctcgctcagatccagaaggaggaggaggcccgcaagaaccgcgcggctgctgccgccgccgccgccnnnnnnnnnnnnnnnnnnnnnnnnnnnnnnnnnnnnnnnnnnnnnnnnnnnnnnnnnnnnnnnnnnnnnnnnnnnnnnnnnnnnnnnnnnnnnnnnnnnnnnnnnnnnnnnnnnnnnnnnnnnnnnnnnnnnnnnnnnnnnnnnnnnnnnnnnnnnnnnnnnnnnnnnnnnnnnnnnnnnnnnnnnnnnnnnnnnnnnnnnnnnnnnnnnnnnnnnnnnnnnnnnnnnnnnnnnnnnnnnnnnnnnnnnnnnnnnnnnnnnnnnnnnnnnnnnnnnnnnnnngagcggaccgtcggtgctagtggcaaggtcaagggtgtgccaactgcgccagctcttggaccccgcacggctagcggaaccgtcccaatctcacctctcatcgctaagccccgccctgttaccactacccgtacggtgacaagcggcggcaccccccagtccaaccccaaccaggccgttgaggagttcactaagtgggctactctggctctgagcaaggggttgaacagcagcatcaatggtgagtttcgtcctgccaatttataccgtctccatactaacatcttatctctagtcgacgatttcgtccagcaattgcttttcctacccgctgaggctgagatcatctccgactctgtctacgccaattcccagactctggacggccgtcgcttctcggaggaattcatccgccgccgcaagcttgccgataagggcattgtcgaccccgtctcacccagtgctttcggtgagcagaagaacggcggtggctggagcgaggttgccaagaagggctctgctgctaccattgcggctgctgctcagcgtgaggaggaggctgccagctctgcgttcaaggttgtcgctccccgcaagaagggcaagcggtaagggtgtgcattagcttttctgttcaagctgttttttgagcctagatagctgagtcggatctgttgtttctatttatgtgagatacgtgcccatgtttgttgcgtgtcttcgccgtgtctagcatcatactcctagtagcattgatatcggttctgagttgtgcatctttttcggacgtacgtacagagataccttgtagcaatatccggagttagatactgcgtgcttattcagcaccgttccggtcgtgggaggtggtcaagtcgacgtgacctaacatccattgtcttctaatcgagtcaaaacatacgtgtcatagtctgagtcgatgaaatatcactggtttatattattcgtttcatcttgtatgtttcattgctgttttgctcgcatgatcgtttagtgctgctttcaatggcaccattcagttcaccagacagagttgaggtttcagggaagcacttgaatggagttttcttcgccaatattaggctgttttgtatattctgtggcatttctcgagtccaaattactgttttcagtctttcaataaatatcccttcaaatgaacatttcaccacatcatgtgctagttgaaaagtaagacagctgcagtgctctcttttagaattatgcagcccatatagagaggtatggtaccatacattggatggtttctttgtgatttagaaataaaaatatatagtcattgtgcctgtaactggagatatagctcttgaagatgtcttataagcccgatgacctatctgtatagactcaatactggctttgataggagagacgacgacaaagccctgaaccatttcgaaaaactgaaaatagattgcatgacgttaaataggtgcggcaggaactggctcaatagtgtcaaatataaatcataacaagcatagctgagttccacccctttatacacacgaaattgtcataaacagatcataaataagttaaaaaaaacatgtccagtgcaatggtcgccatttcacgcctacatacaggatctcataagtaaggatatgattgctttagactgggctctgcagtgcgactcgcctttgattgaagggtcccaacagcctcttgattcccatccagggtgtgttgattggactatcgattccagtatacaagaataaatcgtagatccatcccccgaaggtgcagcctaatattggtgcaaccataggaatctgagaaagaaacacttgtaagccgagaaggcccggaaggttcaaagggttgacccaatgcccaaataaaacgtacccagaagtaatagccccccgcagcccatacttcgtgtccatacccaatcatataggatgtcagccgtggaccaaagtcccgtgccaggtttatggcatatccagtctcccatccaaagcacgcgccaatgccaaagataacgaagaatagtgccagaggtatcaggggcccggcgcctagattgccgtcgtctttcaaagcgaatatcatgaacatcaagaccgcgctagcaagaaactcggagaagaattggcccgtttttgtcataaattctgctggataggtgcaaaaaatgccgcctgttgctgtagtcgagtagccggggactgtgcgggtatttggcccgccctcgtagacgttgatggctgacttatagttgccgtacacgatggcagaaccgcacatcgcgccgaagatctgggacagtgcgtacacggggaatttgcgccaggggaacccgcggaggacacagtttgcaaatgtcacagcgggattgatgtggcctcctgatgccccgctagtgtatactccgagcatgacgccgagtctggtgaatggcgttggttagaagggagtattgagtgatgatagaagaagaagaggcttacccccatccccaagagatagattggtagtcacccttctggccatgactgagtagcacctgagcaacgaccccgtccccaaataaaattaggatcgttgtcccaaagaattcagagaatgcatcacggaagtactccctcactttgaaccagagcagggggcgagtataagggctttcgacttcgcggttgatgtgatggatagccgtttcgttcttgtcagtcagatacagcgagccacagccactgtcatgacttgcaggggggagagtttcacggcggtcttttgccattggattaaccttaagctctttccaggtagccatcgaaaggagagcccaagctctaaaagccagggttgggccttcgaattgatatagtacgaccaaccggggggaatctcaccagccacgcaaaaatgatatggtagtccccccagtatatcaacggcgtagaatcagggacgaccgtgtaaccaaccctttgccctcaatctatcccgtacttcatagaagatgatggctcgattggctgatgcagggtcttgtcctagaagagagtgtgtatctgtgctgtcttgtcctcttggttccggctccagagccccagagggcgtgcaagcttacaggaaagatatcagctgaagtcaaacccgggatcaagtgcacgtatgctttttattaaacttgctgggccggccattctcctttttgttacggtgtctttttatctcacctagagcagaaatttctgacagcgcattttcgctcatagttcattccagggaccgtttgtaggaaaagccgtctggcataggaagccggaagtcaccgtccgatccggttgggctgtttcctctcttttgggtaatcattggacaccgcaatgttgtatatagttcccacttaccggtatgtgtcactgtaataactgcaggaagaagcttctccgtcttctgctactcatcttcaactcttcaggtgccggaactcatgtaggcccaatcgcaagtttctagaaagtccaaattgtgtcacctcgaggagccagacttctccaaagggaggcgagggtaacggaaagagattggtctttccccatgatgatgctgagggttgtattttttgcaatcttttctcgtcggcagtgacacagttgacagttaaccgtgtgatcatatgcttagaggtagcatcgccgagaccgggttgtccggtgtgatagaagtgatatcttgccctccagctgttaacaccgcagtattaactgcggtaaaatgaagcaaatatagacttgcagataaaatttcagttctgaccagtttagcaatcgcaatttgggccatttaccgacagaattctggttgtccttcaaataagaccgagtcaatgcgcgattcccgccgatttggatctgacacttcgtcaaatgaaccgagtcgtcaatcgtctgctgatctctctccaaaatatgcaggaaagtcatgctgacagggctttgggggaattcgggacgagcgagccgtttcctggtaaaataacttttccctaatgagtccaaagtgcattgacttggctaatttcacaatcccagttccaatgagcccaagaaagagtctagacgaatggtcaatacatgttgtagcacagccaattctcacctttaatcccacgcctggccagggataatcccaccaatctattctcacggtgtctccctgcattcctcgaatcggcaccccgccgtgtgactgtgaagctagtatgtacaaacgcttatatttatgtgtttgatgtttcttgctatatctcgagttctcccacgctttgttctttgtcatctcgtgtcatgcgtaaatagacgactcctttttttattcctcgtagattcctacacaacactccataaccatgcagccctcagatatatttgtggggtcaatcgatcaaggcaccacgagcaccagatttttgatcttcaaccgtgagggtgagccagtaacatcacatcaagtcgagttcagccaaatctacccgaatccggggtaagttgtagtccaacccaacaatcggatcaaaagcccagcctggacgcaaattaaccactactagatggcatgaacacgacccattcgagatcataacttcagtagagacctgcatggaagaggcagtccacaagttcgaagcgcaaggtcacacccggagcagcatccaaggcatcggaataaccaaccagcgcgaaacaaccatagtctgggaccacgagactggcgagcctctgtacaatgccattgtatggacagatacacgctctcaggggattgtcgcggaattgaaacagaaaccaggggcagagcagctccaagcactctgtggtctgccgttatcaacctactcgtcggctacaaagctaatctggatgttgagacatgtcccaagggtgaaggatgcatttgaccgcggtaccttggcgtttggtactgtcgatgcctggctggtataccatttgaacggtggcgtggctgccaacgtctttgtctcagattcgacaaacgcttcacggaccatgtttatgaacctggagacgttacggtatgatgaagtgcttctggacttttttgggatcagggggaatgtttatttgcctaggattgtgccctcgtctgatgcgacagcgtacggggctgttgcttctggggctttggcgcgggttccgattatgggctgtctgggggatcagtctgcggcgttggttgggcagaaagggttctcacctggaatggcgaagaatacgtatggcactgggtgctttcttttgtacaatgttggtgacaagctggtgttctcgagacacgggttgctagctaccgtggcttaccactttggtggaaagcctgtatatgcgcttgagggcagcattgctgtcgctggatctgggatcaaatttttacagaataatttgaattttttccacgagtctaaagaggtcaatgaccttgcatactcggtggaagataatggcggatgtgtgtttgtcactgcgttcagtggacttttcgcaccttattggattgatgacgcgaaaggaaccatctgtgagtttctcattaccaggctgttatattatattaagtctgacagagtatgcagttggtatcacccagtacacccaaaagggccatatcgcacgcgctaccttagaggcaacttgcttccagactaaagcaattctagacgcaatggagaaagacagcggccatacactctccgaactggctgtagatgggggtatgagtaactcagacctagcaatgcaggtaaatagcaaattctcttgcacgtgtgagtatttgaacaagaactaatctgattaaaatatagactcaagcagatgtgatatccatccccgtctaccgcccaaagatgcgtgagactacagctctcggtgcagccattgcagccggccttgctgttggactttggcacaactttgccgagctgcgagatatcaatcgttccggcggtacggtctttgagtcccaggtcctgcgacaagagagttctgctaagtttgcacaatgggaaagggctgtgcaaatgagtagaggctgggtgggatctgagagagccgagaaaggagaagccgctggcctgaaaaacgaaacctacgcaccgatgaagaatcatgttctcccgcccaaggtagcacgaatctcagatagctccttaatctcacatgtggttaagagatctacatacactacgggtgtgaaagggagggcccatatctcggtcaaggagatcgacgtcccacctctacctgtgcagacggccctggggagtgtcttgggtgatttggatgatgcggacgaagaggatttgtttttggagctacggaaagtagagattttgcaaagactgaagaagctacggaagcgacagtcaaactgctactaattgtattcttattcctaatatggtcacgagtttattagatcacacatgaattaacataatgtacgaacaatatatacttcaacttgctacaaaatttcaaagcagaacatagattcggatctgagagatatcgcgctgtaattcaaagaatcaaccacagctcaagcaacacttgccttagcgatacgacactgtgcgcagcctattcaccctccttgaggaaaacgcaattcaactcggagccagggctaagtgtaacttcgaattgaagctctggattttcgactttattcttcccaccaaccggcagcgcaataatgcgctcataagcctgcaaaatccgaataacagtgtatcccatttcaatgatagcgaactgctgcccaatacaaatccgcggtcccccattaaacggaataaaatgccacggcctgggctgccagccggaaacccaccgttcaggaatccactccccgggattgaagtagttctccgatcccgggccgtcatatagatcagggtcccgctgcatcaacagcgtcgagtagatgacccgcgtgtttgcgcgcacacccacaggcgctagtccatccggcccaccgccacgtgggagcgtcgtatcgcgcagagagtggcgcacgttgaatggcacgacaggatataaacgcatggtctcgtgcagcactgcattgaggtacttcatttccttaagatcggtgtagctgggtttctgggcggtggcgccgacgccaagtctgtcgcgaatctcgttgcgcagcttggcgaccacttctgggttgcgcgaaagctcgaagagacaaaaggatagtgtgccggctgttgtatcacgacctgcgaggagaatggcgacgagttggtcacggaggacgcggggatcgcgggtgaacctggctagggcgtcgagaaaggtctcgtgggttgaaagtttttcattaagttcgtcggctgaatgagcgaggacggtttggatgtatggctggatgaactcgtccatgatcttgaggtttttgcggaattcggtgcgtgacatggcgaaactaaagactctgttttgagattcagtgttagattaagctcagcgaggctccaatgacagacgatggtggcgtcgcacaggatcgagtatcactcacccgaaacagaagtactccgcttgacgctgttgaacatatttgaacgcttccgcaaaccgtgttgccggattatctagactgtctgtgccgttgccgagcaggtagtctgttgctgcatcgagggtatatcggaagaagagtgacccgacgtccactaccttgctgctgctgggagagtcactaccgccgagaagtgggatgagtttctgaacatgtttctcgaagatttctgtgtcgacaatgcggtcacgcacaaacatgggacgaatgagctggcgggagcgagaccatagttccccgtctgtgataaagatgctgtcgccgaggaactccttccactcctgatggaaggactcacccttaccgtagtcagcgaactggcgggtgaggagtgccttgatattttctgggtccttggtgatgattgttcgggtggaaattccagcatcgagttcggccgtcttcacattttttaggccgcctgcttggctgatctttgcatcccagaattctataaggccgttgacttgattggcttggtagtcttggaacatgaagtcgagagcgtatgggagacggaactcaattttgggagctctgagaccgagacgggcgatttgtgctgaagcttggaatttgcggaatacgcagaatgcaacgaatagcccgagaagccatagcgaggcccgactgaatgtcgtcttctcaaggatgtcttcaatcatggtgccgctgaactggactgggctgagttgatgggtctgattttggtttgtgtcttcgaggggacacgttcagaataagagaaaaaagaactgatatgttgcataacatatgacagggacgaagtctattttatgaaggtgaacttgtcaaacagcgtggaccatacgggttgcaacgtttacgaatccgagaacacggccatcctctctttctagagaatataaatgaactcgtagtgtccaatgatgtatttttcctatatcccaaagaggtgtaggaggatggcccaaaggagcgatgcttgcgagccccgcgttatgtgacttcatgcttcgtttattgatccctattttgtctttgatattgccataagagaatgggctagacataaatccccaccaggtccattgtgatcccggttccatactgtataattatcgtagggacaccgacgaagatgccgtatgaagatacgactctcggtagacaagatttggcgacatagggagatcgacaacactttccaaggttgtggatatgtgggctgcagccacataaatatccctgcactgcataactaactatgttgtatgtgcacatgtccttcatgaaggcctaagtataagacgcctgatacgtcgggccttgagcattcgggctttaggctagagctatagaaagcctcgagacccctggctgtacaatatatatagaacatttggagtacggagtagttaagggaaaggagaccaatgatgtgcgtggttaaggggagctagtggacctattaagtcttcacgtgatctagtggattatcgctctttaactgttctctcacgggtacttgcctttagacaatttcccttctcggatgtcagttgaccgataagttctttgtctggatacttctcattgtgtatagaaaccatgaaacccattcacaacagctcaatggcttggtagtggaacaatggctattgtgaatatacaaactagtactagtgcatatgtagaactttagtacatagtcgcaaaatcaactccttatgtcttccgacagctcaaactttttcacctcttttatctgacccttcagataggattcaaaaataggagcaagggctcttctaactgataccaaatcgaccttgacggccctgtaggctgtggtacattgtactgccccacctcaccgctggccagccacagccacgtgatcaaacatccgttttggtcgcccgggtctttagcttcacttcaatctgcttgctaaagtcctgctttctctaccagaacctgttactggtctattaaactcacttgtgaccccaaccgctactacatcccgttttcatcgcatcttcattgttagtggcgccgataagatccgaaacgcctttatcgggtggcgcaagttcttttatcagcaaagctctctcttcgtgaatttctcaccaacctgtcacttttgcctaacttcacaatcgccttcgccatgatgcctcaaattgttctcgagacgcctcttgcgcaagcagtcgcaagcgtcatccagccgaaattggtggagatgggttggagtgatggccaagagtcaccactgatcgaatacatcgttctcatgctagtcaacggcaagaccgaggaacaaattgccactgaactttcaaaagatttccttggcctccaggaaggcgatactgcagccctcgagttttcgcaatggcttttcactcaagtcgagacgcttaaccaacaaattaatggggctgctccagcctcgaccgatgctaccatgggacagttgaacccctcggcaatggaattcgataactcagctcaaacgatgcccaatccgtttggagagaccaatggccaggatgccgagatgggcgaggccggaaacgagatgtgagtttttaccgtgcctttttgttaatgtttacaagatgctgacagtgctcctcaatagtcccacaggaccgaaagcgatgcgtaatggtagaggcggcaaaggaagaatgttgaaccaaatcaatcgaaacctggatcgtggctcggatgcagctctacatcgtgtgcgcggccaaggaaacgggcgcattggtcacaatggccggggtcaaatgagaggcgtcggccagcaaaatggtcgcggtggccgtgccatgggaatgccaggcggccccatgatgcagatgaccccggaaaaccagatgcagcttatgtcgatgttggaagaacaagcccggatgatgtctcaattcatgcctggcttcatgccacccgctgtaaaccctgcattccaaactggttcccacaatggctcccaaggtcgttcgctcttcaatcgggtcgaacgaggtggtcagcgtggaggaaagcgcagttacaacaagtcgagagcggcagacggagcagacgtggatatggacagcacagcgggtggtgaacaagatgaaagcaaccccgacaatgtttgtcgcttcaaccaacgatgctcgcgccaggattgcccgttcgcccatcaatcacctgccgctcccgaaggtacttcaatcgatccttctgatacttgctcattcggtgcagcttgcaagaacaagaaatgcaccggacgccacccttcaccagcagtgcgatctgctcaccaggcagaggccatgtgtcggttcttccctcactgcaccaacccaacttgtcacttcaagcacccgagtatgccagtctgccgcaatggagccgactgcaagaccgaaggatgcaagtttacacatgtcgagaccgcctgcaagttcaatccctgcctgaacccgaagtgcacctacaagcacgccgagggtcagcgcggtgcttacgctgacaaggtgtggactccgcgctctgcagagcatgtcagcgagcgcaagtttgttacggatttggatggaccgcaagagttgatcaagccggagaccgaggagaacactcagagtcaggagctgaccgcgtgactccgcctgacatgacacccaatgaatgaagaaaaatcactgttcaaaaaccgaaaccaaaaaaaaaaaatagcacacatcccacaacagtctgtttccgaagcgaagaataccatgtacaacccgatcttgatcaacgaacgaggaatggctggagcgaagggcgttgatactctttatgcatttgcttttgtttcagatactattttctgtcctgttcatagattccccctctaaaagaataataccgaagcgaagacaaattcgcgaatgtctcatgaaccattgtgcgagctcgtaggattgttggaaaaagtgagctggagggctcttggttagttagggctcccgaggtccccgcgtagcttaagtaagaacggaagcttccgaggaccttcgggtttagcttcaattatccaaccaactgcgaaccgaatcttgccccgatcagcagatatgcggctaccatgtgtctctagagcactaagaccaagaccaaggcaattgactcatctcctcaatggtcaaaaatgcacatactcagccgtcgtgcttggcggtggcatcacaggactcacagccgcctggcaactcgcgcaagaccccatatgcaaatcgatcaccttgttcgagaaaacagaccggcttggtggttggatcgattctgaaacagttcctgtcgatggtggcaatgtcgtgttcgagtatgggccgcggactttaaggagctcgctcccagggtcactccctctgctttacctggtgagtattgctcgcgtgtgcatgctccgaattgcagtgccttgatatgctgaccccactgaaaggcgacaaatctaggcttgtacaaagacctcattgttacccctaacacgagccccgcggcccagaatcgctatatttactacccggaccgtctcgttcgtatgccggcgccgaagcctgaactttcttttgcggagaacttcgacagctttgtgaatactatgatggagccgctatttaacaaatttctttcagggatagtgaaggatgtcttcactccaccccgccacccaactgaatgggcggaagatgagtctgttgcggacttcatcggacgtcgttttggccccaaagttgcagataatatagtctccgctgtgtaccatgggatttatgctggtgatatcgatcaattgagtgctcaaacactgttggggagcgtccgcaaccttgagggaggtattgggggcatcggtgggttagtttctggtggagttacggcctctctcatctccaggtcgctctccaaaacgaaaactcggaatatggaagactttatggctatagacgccatttctgcaggccctgaattagtgcgccgtcagcatgatttagaggtcctcgcagctggagctagtactttcacctttaagaggggagttggccagcttactgaagcactggtcgcttcattgaaagcatccggcaaagtccgcttccaaatgaacaaggaaatcacaggtttgcgtgcattggcacgtgctcctgcgattgcggtatgtgaattattctgccttgctatgctatacccctaagcccccaaagccctgaaactgatgctgactgtcaatagatggaattctggtcagacaggcacagccaagtcaagacctttgagtatgactatgtcatctccaccattcctccagttgcacttgcgaagaccatgcggaaaaccgagcagttagaagccaagctgtaccctgtcggcttgaccccattactgctacgaagacaggactatgctgtgaccgtattagtcgtcaatctgtattacccaaatcccaaccttctacccgtggaggatggctttggatacctcataccgcgttcgattccctacgaacagaacccagaatgtggacttggcgtcatcttcgcctcgtcctctagtgtagggaacgggacagatccttcatcatctgaagtcaaccaagattccgcacctggaacgaaaatcaccgtcatgctaggtggacattactgggatggcttcgaagagtatccagaccacgacaccgcagtgaaaatggctcgcgacatgctcaagagacacatgaatatcactgataccccgactgttacacggagccgtctccagaaggatgctattccccagtacacagtcggccatctggatcgcatgtataagctctcggacacagttcgtaaagattaccagaagcggcttattctcgctggaaattggtataatggcgtgagtgtgggcgactgtgtcaagcagggtatcttatctgccacctacggcatcggaagaaaccggctcaactacgagcccagtccatggcgtccgtggacttcgtttgattataaacgctggaaacttgagggtggcattgtgatgtctcctgtccgtcttgttgactccaaaatctgatgctttgtgactagtccaagtggctttgctacttatacttggaaatgtacaccagagaaggccaaagcgatgtatagtaaatgtatcaatgaaacaatatatttctcgttgagagttggaaatcgacggcattggccggatatcaaatgttcaatttctaatgtctaatcactgccagctcatggtcggttaacctaaggctaaaagttgatccatttgtgaagtctgttaccatcctcggtcctgatcctaaatcagggtcaagggcaagagcacccatactcccgatcgagggaatggcagagagatgtgacagcatccgaaatctcccacagacgaagcgatgggtgattggaaggctgaacccagttctaatgtcccctgccatataggtagcgattctcacccacctacttccaaccacttgccacaatgatgcaggatagtttggtggctcccggggtgcttgcaggaagccctggtgaatgatatgcacattgacatatactcgacacatggatatgaaatattgaatctgatcttaccccgcgtctcagggttcgaaaaggcattcaggcattcccattgctgtcaccaatcttcttgtcaccattggaatcaaagcccaatacatccagctgccggacaagttcttgaattttgatgactttctccaactgctcgggcaacagcgcctctcccagctgcttcttatcgcgaagatcccgcgcctggcgtagtttcttcttcagactgcgagctttcttctccttctcagcttcgagatcaatcggctcttcaacaggcttatcttctttaggtgcgggtgcggggacacgccagttgttcgactccgcgcccttgccctcagcggtgggcccggcttcgtcggtttccttcgcattccgcttggcctcgcggcgtttagcgttcttgttgctggcggcagtggtggcggcgactgccggtttcgctgcggtcctggtcttgtcgtcttcgctgctcaatgcttccgctcccggcaccccgccttttccgcgggttttccatgctgccgctgcccggtttttgtatagttcgacatcctcggggggcttgtagccggggcgcacgcggatctccttgcgtttagaaccgtcggcacggactgacgagggaatgtatcgttcgccggtctgggcatcggtggtgatgccggacctggcgacgttggaggccatggtgcggtttgtagggttgaactaatgaactagtaaaatatgagatgtccgatagcaccttgacagagtcaagctccaaggcaaagatcagtatccttgaagatccaaagagaaaaacaacgcgaacattgaaagttgagtgcggaaggccggaggctcggccaatcagcggaccggcaattcccgcagattcaaccttcgcaacttcaacctcacaacttcaactctcgctgcctcatactcctcttgaatcctttaatttaggtcgtgtgaaaacaccccaatctctcacaatggctggtgtatgtctatactccctcttccattgctcctatttgcattactacgtccagtactaattgacctctcgcatgacagttcgcaaacgttatctactcgcatgtctccctttcctaggtcctacgatcgcaactgaaacggtccaattgaaatctaaccgacgcattatttgctctgtttaggaccttcattcgcaagaacactgttctgctgaccactgcttttgccggtgccttcgcttttgagctgtgggttacatccaatcctcgagcatgttagatatgctgtacagcttaatacagaaaactaaccatgcaatgtcaaaacagtaccttcgacatcgcctccaacaaagtctgggacacctggaaccacggcgtatgtgaacctctttcccgatggaccgtctacaatacccgaggcgaggacccaagctgactatttctctcactttatagcgccaatggaaggacatcaagcaccgttatatggttaaggaggaggaagatgacgagtaaatggactcgaaggtgattgggtactttaccgcgggtaaaggggcatggaaaagccagtgaagctcgtgcctgttgtttctcatcccatatgtgggcttgtacgtgatagttggaaatctgtattttgactctcaatccctggttatacgtagaaaggccctctatggtttacacgttttatcgccttggtgtatcgtacatattagagtctacataccccatgctgttatttatcatccttgatggttataacaccaagaagaaagagatatataaatagatttcaaaagagatctaccaagacatctagaaagacattgaaatgttcttacatataacgttcctaggtaaggtcatcttcgaccaaatagatcagattgataaaagtttacatccttaagtacagaggccacagaagcagccaactgctctctcctttataccttcaagtcttcaaaccgtggcgtgtttttctgtacatatgtggtgataaggccgtagcgtggctgtggcgtttactgacggaccggttccatcgatgtcatagcgaaaaatgttaccttccggtctctacaaacaactctcaaattgatttcttcttgtatatttttggcctgttggaccttgagctttgtattcaaatttcaaacgcgtatatgacttcaccgtatctgtgctcatctgttcgcctgcattggtccacttcacccgttgctctcaccttccccccaccacaaagtatcatcgtgtgagcaacgtgaaccacacttgagaaccatatcgactcaatccggaccgatcccttgaatcctcacttgagaatttttttcccgcctgcatagccgcgaagaaaccacctgcgtcgcaccattaccacctcgagcgcattgtcgcgacaacggcgctctcccatcacttccttgtgatagcctgcgcgaccgctacggcaagcaagccacaacaacaaatcatgctcatgctcggggaatgtgagaagctgctcggtgatggtcttctccgtttacccaagaaacacaacttccgctatggccccgctgccgagaaggacctgctagagcttctcttccgatcgcttgtcggacacaacacagaactaatacaacacttgttcccagagggaactccggccggaccatggaaactagcggaggctcaaggtgcccgggaaggagctgagtacagtgaggcagcacggggcaagcgctgcggtcatatcttccgtgctggggaagccacataccgatgcgtgacatgtgccgcagatgatacgtgcgtgttgtgtagtcgatgcttcgattcctcggatcacactgggcatcaatatcagatttcgctttcctccggaaactgtggctgctgtgattgtggtgatgacgaagcatggcgccttccgctattttgcgccattcataccgatagtggtaataccaagggaaaggaacgggcgcagcgggcattgccttcggagcttgtcgcttcaattcgcttgactatatcccgtgtgctcgactacttctgtgatgttatctcttgctccccggagcaattgcggctgccaaagactgtcgagggcattaggcaggatgaggaggcctctagattgcgtccggactggtatggcgctggtgatgaagaggaggaagaacctgaatttgcggtcatgctgtggaatgacgagaagcatacaattcgcgatgtctctcaccaggtcacacgtgcttgccgtgaacgagatagcttcggccttgcacgggctcatgaaacgaacgatatgggccgcagtgtcataaagtattcgagggacctaaacagactcttaggggtttctaagataatcgaggagatcaaggttaccgtcacggtgcgctctgcgcgggatacttttcgcgagcaaatgtgcacaacaatagtcgagtggttggctgatattgctggctgcgaaatcctcgaggacaatgagattttcagacaaaccatctgcgaggaaatgcttatgccttggaaaaagggcagtgggggatataacgaagatatcggcatgaagggcattgacgatcatcagcggactgagaaccttccaggtcgcacgctgatgattaatttgcctaatcatggccaggtcctcttgaccgccgacgaagacgaagacgaagacgaagacgatatgcttgatgacgatgctatagacgaagatgaagacgaagactatgtcgaggcccacgatgctgatgatgaagatgacgacgagatggacatcgaactttctcgtgatcgggaagaagatgaagatatgatcttagcaggtgcagatgaggaacttgctctagcagagcgcattctcgccggactcactggcacccagccatcaccccgaccagcactgaatcaaaccgcagatcggtcctctaccgaacgaggcccgtccgcatctcaaagtcctggccctgaatccgcccctacaggttatatccccattcccaagactcctggttcgtaccgacaaaggccttcgaacacggatagtcactggcaagtccggccgcccattcccgccccgggcgaggaagtacctccgtatgaagacttgtggcagcgtactcgcctagactggctggtgctgtatgacttgaggctgtggaagaagacacgaacagacttgcgtgatctctacatcagcactgttgtcaatgttcctcagttcaagcgcattatgggtcttcgtttgtctgcgttgtacacggctctggctcaactgtacctcatcgcggatcgagaaccggaccactcgattgtcaacctttcattgcaacttctcacgaccccgtccatcactgaagaaattgtcgtgcgaggcaacttcctcacgaaggtgatgtctattctctacaccttcttaaccacgagacaagttggcgaaccacaatccgtcgaccccaacgccaccctggcgtttgatgccggctcagttacaaatagacgtctctaccacttcttccttgacctgcgataccttctccaatctgaatacgtacagcatcgtgtgcggaccgaggaacaataccttcctcaattccttgaccttgtcaagctgtcacagggtatttgccccaatgtccgcgctgttggtgaacacgttgaatatgaaacggatgcttggatcagtgcgtcaattctcatgcgggaaatcaaccgactttgccgccaattctgcgagtctttccgcgaccctgaaattgacaacgatgacaaccttctgagggcaattgagaccaccgccactacagcgattatccattcggctggtgtagaacgcaagcggttcgaccaggcagaaataaaagatgaattaagattcaagctactgccaccttttgactttgaggtcggcacctctggtcaagtgccctgccatcgggtggttgaattcgtggtggaacgtggatctatcagtttccaccatgccctccactacacattgtcgtggcttattgaatgcggacgagatataagtagcgagactatgcgtggcgtgctctttgacgctgccaatgcggcgaggagtgagattcatgccgctcggactgctaaccctagtagtatcgatgatatcttgcttgcccttgggcccgaggacttgctcctggctatgtttgactatccacttcgagtttgcgcttggctggcgcagatgaaggctggcatgtgggttcgaaatggtctcagtcttcggcatcagatgtcgcagtaccgtggagtctcttctcgtgattttgcatactacagagatatcttccttctccagactgccttagtcacatgtgattctagcagagttcttgcttctatagcacaccgctttggtatggttgagtggatggctcgaaattacatgccccgtcctggatacgaagatacccagattgtggacgtggcagaggaatttgttcatctactggtgattctcctgacggaccgaacatctctgactgccatcgatgacagcattcatctcacccacgaaaacatcaaacgtgacatcgctcatgttttatgcttcaagccgctgtctttctctgacctctcgacccgccttagtgacaagcttctggactcagacatgttccaagatgtgttggaagacgtcgccaacttccgcccgcccgagggcttaagcgactctggtacttttgaattgaaggccgaatatctcgatcttattgatccatatagcgcacactatacaaagaaccaaagagacgaagcagagaatatctacaaggaatggatggcgaaaaagacaggaaagaatgcatctgacattgttttcgagccaaaacttcgacccatcagctctggcgtgttcttagatcttcctcgattcgccggaacaatgctgtttgcacagattgttcatcaatgtttggaatacgttatctctgcaaaagagtgtacaccaaccatcccatcgacgcgcgttgagacattccttcaagtgattctgcatcttgtccttgcagcagtattggaggatgattccgaggaaactgatatggtagaagaccattccaactcattcaactggaatgctttgtcaaagacccgagagatcaaggctggccacttgaccattgtcggtttattggaaagaatttccgtcacgagtgaattcactgcatctggccctaaaatccgacacatactcaaacgtctgtggcaaaagcgccctcgcacatattcatcggcaactgcgtccctcaaatttcccttcgaccggattgacaccaattctcctgcaattgatgcagataacgacaaggagaccaagaagaagcaagcgctagagaggcaagccaaggtgatggcgcagttccagcagcaacagcaacaattcttgaatagtcagggtaacatagattggggcgaagaagatttcagcgatctcgagtccgatgcagacgcaaccccagaaaagaagctatggaaataccctagcggaacatgtatcttgtgccaggaagagaccagcgattcgaggctctacggtacatttgccttggttcaagatagcacgattttgcgacagaccgatatcagggactctgatagaattcgcgaggtgctcagaacaccaacaagtttggacaggtctgctgaagaagtgcgaccattcggtgtatccggagagaaccatactaccatcaggcgtcttgactcttctggtggtgaagtcattagtgaaaagattggactgagtaaagggttcaacgcgaagagcactattcgtgggcctgtgactactggctgtgggcatataatgcattactcctgttttgagcagtacttcttggcgacacagcggcgacacacccagcaaattgcgcgtcatcatcccgagcacactaatctcaaggaatttgtttgtcctctttgcaaagctcttggaaatgcattcctcccaatcacctggaagggcaaagaagagtctccccttgttccgttcagtccgtccgaatcattcgaccagtggattcaattaggcctcaagcatgccttgaaccaacagcaaaacctcacaatcctcatgcagaaggagaagatttatcctcaaccgtatactgacatctttatcgactacttgtctaagaccctggttcctccgcttgccaataatattgatcaactgagggcttcgtatttcccagcaactgcctctgcacaatacgtcacgccagcacgcatgccaatgccaggtgttttccctcccaccgaagacctctccccttccagcccacttcagcaggtgtcgagtccctcggacagccctatttcggaactgcttcagagctacaggcggcttaagaagacactcacaacaaaccatgtcaattcgatgttcaacaacactcctgaggcgaataacaatgacgatcttgtacatactgattctctaattcggagctttggtttcagcattgctgcagtcgagatcgcgcagcgtggtgtcgagtcagagcccggctcgaccttgctggacacaattccttcgctgacgcttacccatctgcgcgttctctccgagacagtgttgacgtatgctgccgttgggtgtcttaactcgtcgggaccatcaaaaagccatccaacaaatgaattccaggagatgcatcgccaaaagatttgccagctacttgtcgggcacccttgtttgaatggcacagctttgcttaatgatgtccgtaacatcgagcctctgctagctgtggacaccttcgtgttcttcgcagagtcatccttgtctctgctcccagtcctcgatattgatatcagacatcttgtgcgaatgtgcttcgtggctgagattgtgaaggtcgccgtcactttcattctttggccactgggattaaaggaggaactcgccacccaccccgaggacaatactatggctgctggtatatcggaagaacaattcagagtgaccaagcagttcttcgactcggtcgttactgaactgaaggcgaactctgtcggccgtgctgaaggctcatccttccccgctgagagtggctacgtcaaagatggagaggaaactgccaccccaggcatcattacggccgtccggcgacttgtgacgagctacggactagcattcctgcgcaaggcagttattcttcttcatgttcagcatggtgtcgagtttcccaacacaggtttcgccgacgtggagtcctctgagcttgagcgcctggccaaagcactccaactgccttcccttgatgagattctcatgtctgtcaagcccgcacgcaatacaaacagccccttcgatgcagtcatctcaggatggatcttccactggaacgcttcgcgctcaggcattcgcttcgaagaccaccgtctctggcccagtctgtcgcaccctgctatcttcgagcttgttggccttcctaagtacttcgatagcctaatcgaagaggcaaatcgtcgtcggtgccccaattctaagaaggagctcactgatcctagtatctgtttattctgcggagaaatattttgctcacaggcagtctgctgcatggtgaacaagcttggcggctgcaaccaacatcttcaaaagtaatcatacccgtcccactttgtttgtgagtactttccagctaaccagtcttccacaatagatgcggcaaaaacgttggtctttttatcaatattcgcaaatgcacggttctctacttgcacaacacgaacggatcctggcattacgcgccctacctcgaccgccacggcgaggttgaccccggtctccgccataaccgccagcttatcctcaaccagaagcgatacgaccggctactacgcgatgtatggctgtcacactcgattcctgcgactatcagccgcaagctagagtccgagattaacaccggaggctgggagactatttaatgagcataaaaatggggttttttctgcgattgctgatatgcgtgcgtttagattccttacctgcttacttttgatgttcgatggcgaatttgaaacgacggtgattgtgtgtttaaccgatttcttttcttttcttttctttttcactgtatatctgaaattcttctcatcaataggttcccttggtagttatgatttaaaaaataccaggctatgttcaactcaaatttcggttggatttgaatatagtaataccggttccatcgacacaggtaaaaaggtcgttgttttgctgcatatattccctgttataccccttctaatgagtcctcgacactcgcatttcctttctcgcttccccctcccccccgtaaatgactcctacgcatagcttctagttgagggagatgacgtttcttagatatatatatgtctattttgtctttcttctgcataaatatgtgtgcataattggctgtgagaatatattgatgcacaacaggctttctaactatatcctggatgcctgtcatcatcaatctagctcacttgtcgtataggattctaaatgtctaaatcaggattgactaactgagcgaatgccatcgctgctcctagaggactccgactagtgacatttagcagcgccatattgctcagcacgtttctttgaagggactagttgtgacaatgcttccaagactgacagtgcgccaaacgaggccaaacgcccgcccatattcacacatagttggcagtgtcacttagcagggaaatactatgaagtaaaaatacttacctaaattacctgcataactaatgaaaatgccctgagaacctcggaaagcttgaaaggttggccgatagtcttatcagtgccaagccggatctccacctcttaacatgagcctttctcaacttcattgcaacttgagctcgagaaacatgaataacgagcagtttcgccggctactagccgaccagtcatcatcaaaacctaaaccccagagcccaacgcctggtcgtgatgcatcgcgtggcggcgcaaccccgggcgggtcactggggtcgcgaatgcggtccagcattcccatgaccccgtatgtcgtttactttacagattgctatgattgcggaggaagctaacagctggaaatactacaggcgttcagtcactggtgtggactttgcccgtcagctcttcgaccaacgccgcgagggcgaccgaccttctaaacggttcaagtcctccgccgcgccgaagggtacctcgctaccgaccggatatcaggatcgtgcgaaattgcgcaatgcagaggacgaaggtcagagcaacacgggtctggaggcgcgcatcaaggcactagagaatatggttaagttgggacaaatcgaccaggctaccttcgacaaactacgtcgagaccttggagtcggaggtgacattgaaagcacacacatggtcaaaggactggatatggatttattgaaaaggatcagagctggcgaggacgtgtcacaagcggccgagaaacctgcgccgcctcccgaaaaagaagacgtagatgaggaactcgatcgtttgatggaagagcagggagctgaggagcttgctgctgcacccaagcaacagaaagaaaagaagaagggaattatggcaccaccaccagctaggcccaagacccgcgatgaaatcctacgggaaatgaaagcaagccgtgctgctgctgccacgcctcccccgccaccggagtccatactcggctcgaaattcaagaaactgggcgatagaaagcccgagaagaagcgctttgtggagcatgatgagaccggccgtcgacgcgaagtgcttctcatcaccgatgcgcaaggaaacaccaagaggaagactaggtggcttgataagccgaccgaagtgcctgtacctactgagggggagctcatgatgcccgataaaagtctcaaacctctcggcatggaaattccagctgatattgccgcccgtgccgctgcacaagtcacacccgaggatgaggacgacgacatttttgccggtgtcggtgatgattacaatcctctcgctggactcgaagacgattcatcgtctgatgaagacgatgaagtggcagattcggctactcgcaaacccgaaaagggttctgtgggtgaagaggagaaggaacctgccgcgtctaaaacagcacttgcaaagcccaagaattactttgcgactgggacttcgactacagcagaagaggagcctatcgaccgttccaaccccctcaccaaagatccaaccattcttgcagccctcagacgagctgcagccctccggcagagctctccctcggcagagggcgaagcagacgagtctgatacagcgcttcgtcacaagcgtttcattgaagaggcacaccgccgagacgctatggatgctgcagatatggatatgggattcggaggaagccgcaacgaagacggagcggaggaggacgatggtcccctgctcgactttgacgacgacgagcgaggcgggaaaaagagaaagcgtggccccaagaagaagaagggcgacaaagatagcgtcatagatgttatgcgtgttgtcgagagtcgcaagaaggaggcttcatgagtgtcattgctgcggatgccaggacatgggctctcccttgtctcctacatgtactttatactatgaaatcgacatttgaagctatttgataccctgctatgccatgccttttttacttagatactagaagtcatcttatcatgaaggccactcagtcacctccggcgtttacaaatcgttgtattaacccctttctaaacgctgttggatatcatccttagatgcaatcaaggcgatattcactctacatatctatataaaagtggtcagctgcttatctggccttagccttcaacgacgtaggttggtagggatggcattgggtagagacagtagagacatcttgctaacaaaatacctcgatgtcttttccagtacatatctcgttctgaaatattgtctataatggtcccgtgaaaacctgcgtcactatgtaataagtactgcgtgtatgggttaacgtattccgtcgatatcttcggcatcggacgtgtgccagccaccactaggttaatgcgtctatatgatctgggatttcggcttcgtcgtgtctcgcttgcccacaggacaagatagaatcagttctcccattgggagatacttgatcctttagactaagtcttggaattcgtcgtcacatcttcccaaacaggtcacctggggcatgttaacagggtggtgctttccctatttgagaatcctactttccctaaaacagaaggaccccagcttcagtccccagtttctgggtataaataccctcccctcccccccatctctcccatttttttcttttctcctacatccatcttccatccatcttctactccccccctggggtttggacgtttgttcatcactcaacttcataaccatcttttcaccatcactctcttttcttctgcgtctctgccacatcttgctgacccccagatgtctcgccacctggaccatgttgactggtgagttcctccttattatttgttccttcttatttgttccttccacatgttccttccacttgtatggcttgtcatacccgaggggtttcgcgtctcgcgttgtttatttctcttccctctttcccttttttatccatctctaccactccgtgatttcgtgtcatcggcttgtgtggttcaatgacttcatagaatcttggcatcatgtatgcctcctaaataactcatcatttatctaatatcgactctgattgatgtgttatttctgctcatgggacgaacgacctcacggtaatcatgcttcaggtgagaactccagcgttatatcaaccccacggttctttgctcgcaatgagtggaagacctcaccagtccattggctgacgcagggaaacttcttcttcctctgcctttatagattactgcatttttcgccgcctttgccgtatccagtttgcccacagcctatgacacaccatcgcggtcaacaccaaatataaaggccaatcttccatccgcaaactctacatccaggtgaggtctcctagcggacacaaatggaaaggaggttgaacgcacccgcaccagcctccgtagatagttagatgagattctgcgatgggatctcaccagcatttgctgacgcttgttggttttttaccaggcacctctatatccacagttaagttacgaaaatcgctatcagagctacttgatccttccgagcgtctcgatctcagctgtcgcccagcccagcaatgtctgccaattttagcgcggacaagtgaatctccagcgcggtatactccacactgcatattcaggtgaggttcctaagcggacaaaaagggaaaggaggttgagcacagacaccaaaggcaacctccatagatagttagatagggttctgcgatgggatctcaccagcatttgctgacgcttgttagtgtctcaccaggtacctcgatatcatcagcaaactcgaaaaagcctgccagcccacttcaacttcctgcatagagctggttcgtcttttatccaatcgactgggcgactcccaaatatgagcatgagtccactctaggttgttcccacgttgcctatctcatcatgcaacaagcatgcacatgatatttgctccaatgtgcattttgaggtgaggtctcccagcggatacaaatggaaatgagattgaatgcaaaacgccaacctccaaagatagttagattgagttcagcgatgggatctcaccagctttgctaacgcttgttcgacaggaatattaccagcccagatatgcaagacctgccaactcatttcagactgctatcgcgcgctgcgtcgctcgtaattgagcaaacacgcaaaaatattcgctttgatctgcgttttcaggtgagatctcccagcagacacaaacggaaaggaggttgaatgcaaccgcaccggcctccatagatagtcagatagagttctgcgatgggatctcaccagcatttgctgacgcttgttagtcttaactaggcatccccatatccgcgtcattcattcgggcttacttgcgactcaatgctcttcatcgatatttaggtaaggtccctgagcggaaaacatatggaaaggaggttgaatacaaacgggcaacctccaaaaccaaccttcttaattagctagaaagcgttttgcgatgatgggccttaccagcttttgctgatgcttgttggttttaaggtccataacttgaacttgcttaccactcggcggcctgtcaacacgacaatctgatttatcttgatcaagtaagattataaactgcaccttcgaagtcgtacagttggctgactactaccatatctgtttttgattgactcttccaactcattcggtgctcgaccagacaaaagcgttgagtctttccggctttatacgtgtcgtgctgctgggctacaatgctctagtggcgaatatttcttattattatttcaactagacgaagaccacagccagcatcgggaaaaagcaatagcagcagtgtctccattgcaatatacacggctaacatcactcagatcaggctttcagtcggctattcatctgagcaatgtcaatacagggcgacaaggtaatttgaaaccccctataggtcaacgagcgaattgtggaatatggtgaatggcctactggcaacattaaagttacaaaagtggagattcaatgtgaataaatcgatattgaacatcatacaacaaattgacttgaccttcaagaactaaacctgtaccaaaaaaggcagttagagatactcctattgacggcagatttgaggaagagagaaagtagcaatccactctgtagtccacggatttcaagtgaacaacaaaaagcaacatagagccgctatgggtgatctcgcacacgctctcagccatagggataaatgatttcactttcaggagattctcgctgccttcattcgtcttatttcagtcaacttcatatttacctaggtatctgggcattggattgctgttttcataactccagtttttattttctccccttatcccgacaacattatcagatcaacaccaattaatgcccctttcccacctgtgaacatcctcagcgaaaagcatggtaccgtggagtaagaagaaagaagaccaacgtgatagttagaccaatgaaataggcactccagcagattgcattcccgtcaaataccaggtatcgtataaccgactagctcacgaacaggacaacactttattctatatccccacatatatagaaaggctctccgtcgagagaatggatggagcttataacaccaccagcagtattgccaacgagcattctgcagttgacgaaccaaacgtaattccgaaactggttcacgccataggagctcagtaacccctgttttacgcactcgaagaaatgactggtaacacgtcaagagatatctgcaagttatcgcgaggcaaacttggtccgtgacccagaggaatgtaaagaggatttccactatttctggtggaatcctttggaaattgtcgactagtgggggtttctgctgggtcttctgttgatgggtggttcgtcgatgtcgttggaatatggatctcatctttgtgagtgggcgtgtatgattgtgcatattggaatatagcgaaatggtgagtgaaatggaaaatgaaattgacttcggtctcttttacgttgataggcgtcatcaactggaatagtacccatgggtttctaccagcttagggctatagtgctgttcatcctccttctcatttctctctattttcttttctgttactttctgactgctgaaacaatggatttagccgtcgttcagcactactttgcctttattagcatcacagtttcgactagagcctacgaatgatggcactatgcaaataaggtaagccaaccagtatctaggattagctgatccccaacggattgaccttagaaacgcttcaaaggcaaaccccacgaaagacaaatgtcaagatgcaaagttcaagcctctttgtctcaaacgaggccttaagggtgcacttgtgatgttaccaagggcaaatactgaagaatatgagacatctcatccatttgatatcaaaattccctttcttcgctcctctttcatcaccaccgaaaatcatttttgatcaaaaataagaattgcagagcatgaccagccatcaattgccgttgtttttgatcaaatattgagaatacttacttgctaagaggaaatttcacgtgggtttgatgttgaagcattgaatattctccctagtgtggtgtatctcagcgatggccaagagagatataaattctcacgtagttgacacaaggttgtgggtcctggtccgtgcgcatcccgacgtcccaacctgacttccgatctcgggacttccgacttatccagagaccattttggcgactgaatcgagcgaacatttgttctcatgctgataacacatccgtggagatacaggggaatcatgacggagaccgcgggtttatcaagacatcagcctcgcaaaccacgtccagaagagcggcaaaagcggccgcaattgacacatttcctgtgtctccctctggtaaacaccaagtcgctgctgcagctggaatcatcgctcggggccttcataacagcccatgtcgatgaatctgggccagcttctcaatcgtcccccaagggccaaagggatacatcgcgcctgagtcttccaaggacagcttttcgtccactgggcacacttcaccttactcttggtgtgatgagtctcgccaataaagagagacttgatcaagctcttgcttttttcaaatccctcgacctggcagacctaatgagcgaagtgacgcgagccgccgctcactcacaacataaagacgcccttcaccaatcatcgcccttgacggtttccctcgagtcattacatgctttgcctcaaggaaaatcagcaaccgtattgcatgcttctccagtagatcatacaggccgtttgcttccattttgcgtaaagctacgtgacaaattcatcgaggctggcttcatccaaagtgagcccgacagaagatcggcaggaagacataaccccaccaatcgctccgtccaagacagccctcaggcctctgggtcagctaccttctctagtgacgtatctttacgccagccagaaagccaaacttcctctggtcccgcagacgtgtgcgaaagccggaacccattcataaatgtaataacacgaaaaccgaaacagcgaccacttcttctgcacgcgactcttgtcaataccatttatgtccgcggccagcagggtcagaacaagggtgcgaaaggaaaccgtccacccaaatgccttacatttgatgcccgcaacctgatctcacaatatcgtaattactaccctgatgacaatccaaatatcccacaaccagcacgtactggatcttccgaagacaaaagtgacccctaccgtacgaaatcttcaccaatccccgacagaaacatcgtttcctccgagcataaaagccattcggccacttctcccccactgtcgcggggctctcctttcatttgggcaaaggaaattcctctggttactatctgcatctgtgaaatgggcgctaggaaattacatcctggtgtcaacgaccgccatggtttgaatgaacgcctcggcgagaaatatacggtcgttgcagaacggaatctgaatttatgactgtcatcgccacccacataacatccttaaacattatcaattgggaatcatccttgtcaatagaaatcttgtctaagacctatatgtggaaagtaaaaaaaccaaattgtttaagctatttgttttccttctgtatcgctagtaatattaatgagtagactagatagatcccaagcctgcttgggttgcagatagtacatgtggttggggttgctcatcataaagtgagctggtccgagtgcagctcgacgtcggctaagcaacggggagaggctctatgacatcttcttggggcagtctgcaaagatccgacgggacattgaaagccagacagctagtacaacaaccctactcagccgagcgcggtgaattgcatatcgggctgggatgaaacgagaatatgagtgcagttgaaaatctacacggtcaagtacgaacaaatcatctcaaccgactcatgatggtctcctgtccccgttcaacagacaactccgcggctttagctttgatggcagtgagcatgctgcgctcgaaatcatcacgggtacgcagcacagcctcaacccatgaaagctgcaggtcccagtactcaagcttgaatgcttcataaacctccacgagcgcggggcccttttcagtggcaaggaggcgaacaagccaatcaactagccgccacttctgcttgatagtaccctcaaatgagtcggggtagttctcaaagaacgcgaatacagtgagaacgtcgtccttgaacttgtctgtgaaggggtcgatgtggcggcggaatttaacacccttgttccgcaccgcagagaggtagcgcaccagcagctcgtccgagagttcctcgaccaggatctcggccaaagatgggtgcagcacggaggcgtagtccgccatgtagtcttcgaaggtggaagtgatacgcttcatggcaaattcgccgtaccagcgggacgtgaagaagtctggcaggacagtgtccagatcgacccagaagatcaggctcacgaactgcgccaggcagtgcgtgctcagatcaacatagccatcgcgcagtgcatccagctcgatggtcgctgttgtgcccatgtacttgggtgtgaccatgggctcgaaatcggacttgaaccgcgtcaggtagccgaactggttgtcctcctcgttgtcgtcgatgcaggagatttgatcgttggctattccgatcagccagtcttgcaacagctgcacgccttcttggtctgcgccttctacttggtgcttcgcacattcctcgtccacgagtgcctgccatgcaatttgtcgggccttcaaggcccggaacatggcatcaatgataccttctaccaggtctgcgcggtccgatgctcctgatgccataacttgttcgtggagcatgcgccacatgtcggccagtgtcttggtgcggaagtgaccttctgcgttgttgtctagggcatctgaggcacgctctaccagagactttttgtccgcgttgaaaatgcggtccatccattcttcgacggcattgatgatgacggcctgccactttcggactagttctggctcgcggtcgtcgagaatgttgggttggagatctgttggtgtccagcccagcttcttcattttcttgtagtacttgtcgctccagtggatgatactgagtaaattatcagccgggagctcggggtcgtcgatcatgctaagcaagaagtcatgcatcatctgatgatagatatcggtgtatgttttgaatatcttccatttcttcgggacaaggctctgcatgccttgcttgaccgtgaatagatcattgaagtaccaccggaacttcttttccagattgtctgggtctccaagaaagttttcgagtgtctctttgaattggctttgggcgtaaagctcgatagcctggatgaatttgtccttgtagccccgcacagtcttggggccaatgttcatggacttgaaacgacttgcgaggtccttgtggtctttctgggcctcttgcaacgctcgaactgtatcatcatttttctcctcgttcaagacaacaacagcaagtcgcacgaccatactcttgttgtctgcctgcaccaatggaatgaggttcatgcaagccgtgccaaggtgatcatcgaaccactcaataacagaatccaacccctcaaagtactctgtcagagtctcttcggagctctgatcctccgccttgcgaatctgatccatagcctcatcacggaaatcccttaaccgtgatatctgcatatgagcccgcagaatattaggctgattctccatatcgtcatcatcctctctgagcaaatcctccacttcctggatatccgcgccgaaattctccagtcctcgtttcatcatgagcgtagcatcgaaatgtctttgaatccgcgcaagttggtcaatctgcgcaaagtcctccacgctatgctgcgactcggcgcatagcttgtcgatgccttgtagctcgtcttttgtcttcgagacttgtcgctggccctcagtcaaagcaccaatgctgcgttgtacggcctccagctggtctcgcagaccttcacgcaaccgggaatcaactgccgtcttcttccgcaggtattccgctttaagcccgctgatcttgtctagatcctccgggtgccgtaggaggtcttcgagtcgcggcagagcgaccgtggcatcaatgttactggcttgcgtcatggcctcggtatcaagtatatggtggtgtcgttgttccgggttgctcgaagctaggtcgaggggtgaggtgtcaacaatgcgggcatggggctttgcttgcgagaaggtagtacgcagcagtgcactatgatataaatccaggtactatcacgccggaaagagcgcagcccatagtctctcgtttcaaaatatgaaatactatatcagctatcacaggccgatagtcgtcgctgctgtcatcgggttctggcagaatacccacgtgacctaccgccttagaattggatttgcgggatcgcggccatctccatgtcggcaacatttcttcgccagatcacagggtcaattgcgcagcagatatcggctgcaaattctcaaatcaagactccggtatcatactagatccacttcgttccgttccacctattccgaatctgattccacgactccggacaaccaaaccaacctatcgaaagcacaaacatccgaatatcagatcctcttgatctgcacaatccaacatgtcctacttccgtatcaccctcatgcgctccgcaattggactcccgcgccgctcaacagatgtcctcaaggcgcttggcttgaaaaagcgtatggcaacagtcttccacagcgtctcgccctccgtcgcgggtcaaatcatgaaagtcaaggaacttgtccatgtcgaggaatgccagtaccgcctcacgaagcaggaggtgcatctcgagcgcaagcctgatcctggatattataccgaaaagagctgctctgagcagcggaaggagctcggtggtcagtgattgttttcattgagcttcgtgtggaatgggctgcttttcagactgcggttttcaccggtcttgaagattgcgatgcaagatccgactcttttgaaatccctttcgctctggtgcatgattgatcgatcacgtcctctttttttgctgttttggctttgcttgcatggagcgggttgctttttgttcgtttcttttgttcatgtatactacgtccacatctatcgggcgaatgttatatctgctaggtatccgaccgcctaaaacatttacacttcgtaagttaatctactacgaggagattattgtattatatgcatagtggaatctaacacttgaaataaatatgtgcaatttcaaaggacctggataataataacgccactgcaccagtagtttaggtaaggacagctagggggcaccaaaattatacactaggaacagtgcggataggctgagcgaagaagatacgaacaaggaaaaccgagttgttcacctaggctttgtacagggtgtccaagaagccttctgccagacggctgacgatactcttatcaggaatgctgccagcgacaccgtatagagcagaggtatcaccacgattgaggatatatgatttgccctcgcgcttgcgctgctcggccttctcaagttccttgccaatgacttcacgcagatcagcaatgagctggtcgacagccttggcagttggaatagtgaaggcacagtgaatagccgggggagattgcagagcgttgagatgccagcctttagcagacaggtcatcggcgatgtcgtaaatgtcaatggcaccgttcttgctgcggaaggcgaccacactgacgatggggtcaccgaggatctccatgtgcagtgagatggttggatcggtccgaacggccgtctcgaacttccgtgccgcgttgatgatatcggtgcagctgttgatgtatccgttctcgccgacgctcatcagactggcccaacaaccggcgatcagagcgccagggcgggagcccgccacggagggagaagcataaacaccgccggaccaatcggggtagatgaagtactggttgtttcggtatgatttgttgcggtagatcaagaccgagttgcccttgggcgcgaacccgtacttgtgggtgtcaacactgatgctagtcacacctggttggcggaagtcaaagccaccttcttcctcgtagggcgagggggatccggccttcttgaggtatgcaacgacgaaagatcccaagcagcagtcaacgtggagagggatcttgtacttggtagccagacgcgatagagctgggatatcatcgacaatgccgtgggggaagttaggtgccgatccgacaagaaggacggtattgggattgattaaacggcgaacagcatgcacgtcgaccttgaactcgggctccgggcaagggactcggtgcagcttgatcttgaagtagttgcatgccttgataaatgccgcgtgtgctgtatcgggaataatcctacgatgatcgatcagtcctgctggtcaatggtatagtatccccatgccaacttacatctcgggctcagtaacaccgcgctccaaaaaagccttttgccgggcggccaagcaagccataagaatagactccgtgccaccgctagtggttacaccggcaccatccaagggggcattgaagagagcaagaacctagagcagacatcagccgaaaggctccaccaaatacgatactctcgatatagaatgtcatacataccatagcaaccacctcagcctccatcttccgaacaccagggaaaacatccggatgaatcggattcgcgacaccgaactgcccgaatgcttcagcctggagtttcaacagctccgcgcctccatgataaacggcaccgctaacgcgaccatcttcccagcgtgtatgttcaagcccagccaacttatcaagttcagcgcggacctgctctggcgaccaaccctccttgggcagggtaagataccgtgtgacatccggcccagagtttaccagtttcgactcgagtttcgtgatagcagtgctcacttgcttgtcgacctgcccgctgacaccagggacacgcaggaagaggccatagcagaacaggcggagcgagatgtagatgttgcggatgctgccgaagatgccgtagccgcggatggagtagaaggtcttgcgcgtataccgaaggatgaacaggataaatacgatgttgcgaatactggatcgagagcaaaatgcgtcagtggtgattgcgtttatgtctttcgttccttgattgcgcggggaacgggggattattcaacttacaggtcgatattcaaggcagagaggtgcgcgctggacacccggccgtagccgaccagcttgttctgcagagcgactggcagcatagaagagctcattgttccccctatgaatagtctgcaataatgatgggtgagagtggcgatagggaggttccgagtagtacgttagtacgttttaactggttgagtctagcgggcctcggctgccacatgaagtaggcactcaacgttttgcatacaatgacgagacattggatattatagaggttgagtattgatagacttgaaattatagctattcacgcggtattataataatatctttatatctttacaagttagagtgacccttcatatcaagtcctggtctttctccactgacgtaatttgaactagtacggaatacgatgtaactaactaaatgcaaacagtctcaagttcggaataagttactgcctcttctgcgctaaatgtacaaagaaaggagaactctcttctcctaacacgaatgtgtttttgggtcccccaaaagaaaagaaagaagaaaaaaacagcaagacttttcagacccttatatggaaaaaatgtcaaaacaaatgaaaaagcatcaaatcatcaggtatcccgccacgcccgaattttgcccaagccactgtcagatggcatgatacaatatatgtattggtcaaaggaaatcgcctataccgcaagaccggcagcctgagccgcaaggagctccttctccttggcggcgaatgcggcctgctcctcggcgctcaggtcaagaaggggcttgttctcgccggacttcaagttacggtggtaggcgcggataatgctgtcggcatcatcgacggcaataggacggatatcagccatagccttaatcttggcagtgcactccttgtattgagcgtcagtcatctcaagcttgagctgctgggcacgcgacttgatggcgttccatccggtcaaacgggaggcgaagtggacgtagcgggtcatgccgaagtcggcagggttgataatctcgtaggtgctggggttgttgaggatagccttggcgtggataccagccttgtgggtgaaggcgcagaaaccggtgatgtagttgttgaaaggaatgttgacctcaacggcctcggcgacgaggtcctcaatctccttgagcttctcaagcttgtacttgcccttgacgtagtcgcggtcggcgaccatcatgcgggccatcaggccaccgagaggggtgataccgttacgctcgccgataccgagaaccgaggtatcaatgtgagtggcaccggcctcgagggcacagaaggcattggcaatggcacagccagtgtcattgtggaagtgagtctcgatgtcacagccaacaacaccgcgcagaacacggacgagctcgtaaacctggcggggggaagcgcagccaacggtgtcggcaataccaacacggttcacaccaaccttgtccacggcggagtagattgacagaaggtcaaccaggtcggaacggaaagagtcctcactggagaagcggatctcaatgcccttagacttgacgaactcgataacttcaatggcggcgttcttgatgtaggtcatgtccttgccgtgagagtgctcacggaggtaagaggaagtaccgataacaacatcactacggaaagtcagttcggagtcaagaaaataggacaaaatgacacgactcacactccatcaacaccggtctcaacagcaatacgggcatcgtccatgtggcagcgaatgtgagtgagaatctgaacatgtcattagataccaataatcacgagatcagagcagaaccctaacataccttagccttcaggccaagcttgcaaatggcctcgcaatccgcacgggactgctcagaagcgcagggacttgtgagttcaatctatagagcaattttcgttaacctcagtccagggatataaagacttcgtctgtcccgcgactcacgtagtccacaccgaagtcatcgagagccttggcaatctcgatcttcttggcggtatcgaagaaggcgttggcgaactgctctccctcacgcaaagtagactcaataatcttgaagcgtgagacattgctaaggaaatcggtgacgccagcgtcgtgaccgtaggggttgcgggatgaggaggggtgtgggttttggcgagtctcaatgccaacaaaaccagtgtgatcgccatctaaataaagatcagtgggcaattctggtatattagctttcaattggcataccaggagcaatgacgccaggagcaccattgtcttgcccattgggctcggagtcggcaccagtacacatggtgcagatgggggagttgagtatgtagggtcgagattggaaaatatgaagccgggaagttcgggataattgagtaatttagaatgaagattgagatagaaaaattgagcagtatttaagatctttgtagtaagaaatcttaggaaaaagggaatgaagagtcataaattcatagcgccgaagtggtgggcggtgaatctgcgtaatggggggcacccccctcgctctcgggcggcaaaaaagaaaattttgattgtggagaggtgggggaagtacattttggaggagtatgataggatcagacagcctagcatggtctacgacctggtatgtacgatatattgcactatgactcaactgtctatcacttccaattcctcgcttcaccgaaatctgtgattgaaacagtatgtgtgatgcagtttacttcaatgcctcagaaccgacatcggaccttacctgtggggtctgactcataagcccagagctcaattcaactgacaatgcaattctcgacaaacatatgttgtatagagtgagtctataacagctatgtcattgctatcttcagggtgaggatccaagcatttgattctcattacagtatgtatccacgagtccgatgtggacgggatagtgatgtcatcatcatttccagtcttctagttggctcgagacccctgggcctgtgaaataatctgattacaaactcctaaacaaaggaagattcagttcatgctagctgcaagccccagatgacttgaaatcagtttacatacacctgcggtctttaaccaccagtacatcccaatatcagaagttaatacataaaaaagttcacttcacaaattaagccttcttgcctttttctgtcgtctagggaagatctctaagaaagatctaacaagactaccaaaacatcccactcccatcgagccaactggatcatatcattctcgatttctttcaaactctggccaagtgtgatagtcttcttcaatatcaccactcggttgtattaacattgtagctctatataatctgaccacaatttacattgattactatggaattggggttgtttcaatggtacaactaaatggttcctccagctcaacaagagtcttaacccctacggatgcaagattgagtttagtgcggctgttatagtgacaccaaagatcaatcatgcagtttggtgcatacaatctggaggtcattgtattggagtattgtattctaatccgggatacatttagtccaccaacggaaattgagagtattttgattctacatgttcctatagagaaagagtggatatcgataggggcaaatgattgcgtagatatggattcgtattcaaggcataaagagattgtatgtttttacaatattgatttcatacttacaaagtgttccattcgcaagaccaatcagatacatgcattatagaccttctgttcgaccgggttgaacgatatgcaacttgaagcaccagtgttttctagtcacatgtagtttccagcctccaagagacccaatagaaacaaaacgatcttctagtatacatcctaaagttgtggggtcgggaactttatgcacgacagaatccacatggaccgagaagattggaaaaaagatctaatcgattgcaataaaagaaatgatagtcagaaggcatttagaaggcatctggaatcaatctagaacattatctgcactaagggatggcgccattggtgcagagaaaggaggcgcgggagtgaattcaagcgttgtggttggccagcgctcaggccagctgtcgtcccaactagccatctccctctgaacaccattcttcctcttgtctctgactgtgtcatctctatccgcctttcagtcattggtatgtattctgatatcactagtttaaccttgtattaaacttgatccatcattcccgaaactgtgtcactaatctgttccacgcctcagccctcaagatgcgtttcacgtcgctcgtcaccctcctccctgccctggccatggcccaggagcaggttcccctcgcagaccgcttgcaggggtggttcaaccaggtcaagtcctacgtgccgacagcagcccccgttgattccccggtgatcgagaagctggccgagaaggttaccgagaagagtgtcacccacctgtccctggacaactggaagtccgtccttaccccgggaccccaggcagaggattggctgatctacaccactggtggcaataagacctgcttcggtcgctgcggaactgccgataaggcattcaaggtgagttgatattttgcccccgacgcgtctttcgcccgtcacaaaactctaacatcttgttctcaattcctaggaatccgtcctgttgttctccgccgatcccacctcaccccacctcggatacttggactgtgaggccaaccaggtcctgtgcgccgcctggtccgccagcgctccctccgtccagtactaccaggtccccaaggagccatctgttggcgaggagcgtgccccgactcccctccgcaacatctacctgaacgccaccaccgtcacccccgagaccatctacgagatccactccaagaagacctacgagaaggtccccctctacgagggtgctctccaccccgttgacggctgggtcgctaagtaccagctcaacatccccatgggctacgttatctggggtctcggtgctgttcccagctggctgttcatgattggtatcagtttcttcagccgtaccatgatgtaagttggaattgatttgtgcttgtcatttgatatcagtctaacaccggaattaggagccgtcgcgcaggtcctactggaaacgcccctcgtgctgcagcccccgctggtagcgcaaactaaataacctcttttggtccctgttggtgttttgggttgtatataatcagtggtagtgtattgtgacgtgtccaatatactgcttgggttggtttgtgttctttgttgggcagtcatctgtcgggaatggagcctcttcgatcttaggcctttttctagctacctttttaatcaacgtatcctagctaattatctagtaggagattgtaacagattcaccgaatatattggtaactgtttgatgccaaccttgctttgcctctgtatccaaaacattatttaaacagtatatcccattacacagtacgtcccgaaaccgataaaataatagcgaacaagaatcctcaaccactacacccttccattgactttagattcttcccgcaattgcgtgtgtatttcctcctacgaatgtgacaaagtaatttcaggcatgtattcgcttgtaatttgaataaacattcagagatacgaagtgcataaattcttcgacatgctaatgccattgtaccaatttctaggtatctaaccacccgtcaagtcgcaggcctgtaagatatcccaaatgtgtcgatccatcttctctgacatccagttcctccatatcacgaagaacctgctcgatatattcgctgacgccgctaagtttcataataagtgcaatggcgcggtggacattgagaagccggggggatggcggatctaccgtgtgatggagacttagggtaagcgatcgggtgacgggaaacaagggatcacgtaagaaaggactgcgttctgtagagtcaatcctgtactgatgttgtatgccagtatgttcgaaatagatcttgaattcgccgaatagccggtggtagtctagcgttagagtgagggcgttcataggaccgtcaataagatggattattccgggatcgaatatgtccaagatccgaagagcacttttctttgaatcgctctaggcatatcagcaccgtcaaaataccaatcctaataatcagacataccaaatcggtttcaccagaagctaccgtcgtcagacaataagggaaaatttgggcaacctccaagtattgaaattgatcgctagactcatccttcaataggttcccgtcatcatcagcacaaaattccgcattctcctcgaaacgctttctggctgctgctctatcgaatttgcgagacactacacagcggtggcggtcgcgtagaagacaagtctgctgccacgttccgatctgtgttgagttctgtagcgatgataacgatatgggcgttggctgtgatgtcttgactgatgatactctaactgcaattgcgaatgagcatatacttactagaggaccattatatatataagagattaacgaacggggaaggagaaaattttcaacgatatactcagcaaacatttctaggctctcgtgaagcttgtttatttgttctggctcccatgaagaaaatccttcgaagaattccaaggcgtgagtaatatcagaatcgaaggcatgtccttcatcatcaagcaggtccttatggatatacgagaggaagaaagtcacaaaggtatccggcgatttaacgtgctcgagagcagcctggataagtgacgcaggccgatagcccttccgaacggtcttctcggagccataatgccgtataagcctgatcactaggttccttgccgacttgtgctgttgtggtgttaatgataagggcattgagaagtctaaagccccctctatggagggatggtgacggtgagtcgccatcgctagaaccttgcgagccttagggtgaggcgaggaagtagaaagccaaagccagaaccggcgcaacgaagtcacacaattgagaatattgatacatcttatatagaatataaagacatccagtctctaataatgtgtttcatctgaaatctatcaaactaacgaagaaaaatgagcccaaggtgggcgcagtggaacaaaacgtgaagtctagggcggtcgagcttccctcaaatttcatttcgccaggccgagatctccaaccaccaactaaccaactcaaaatggccgccccagtaccgttagatcgcataccccccacgacggccgcctatgtgattgcaacagccatcattgcaggcgtgaccggatattttatcggccaaggctcctcaatcagcctcttcaaagaaaaggaagggtggccaaacagctacgatgtgaaggtccacagccactcctccgacgaggaggacgaatcagactctgaagaaggagagaccgacgatgaagatgagggcaacggcgaagaactgtcgagcttcaaggataacagcgaggaggtgaagctggtgctcgtcgttcgcatggacctaggcatgaccaaaggtatgtgttcttcgcgcaacgtttcaattattcctcacatttgtgttgcaagcgcttacaatctcttccttctaggcaaaatcgccgctcaatgcggccacgctacccttgcttgctacaaatacttcctcgaatacgcacctgactcgcctatcctcagaaaatgggagcgcggtggccaggccaagatcgcattgcaggtcaagtccgaggatgagctgctggtgatgcaggctcaggctattagccttggactttgcgcgcgcgttatccaggatgctgggcgcactcaaattgcaagtggcagcaagaccgtgctaggaatcttgggacccagaagcgtggttgacggggtgacaggacacttgaagctgttgtaaatggttacacattatacatttgctcgtttggcatttagataggcaatgacgatcatgacctcgacgaccaggtttccgacgttaccgtatccatcgcgttgagcatgcgacacacggtgatacatcacatgcggacatagtcgacataattgtagcacgtttcctagataccctagtcgcgcaaaaaggggacctcctttgaatctaggagctttatagtggaattacgagttctatataagagatgttggcaagtcatggttattccctaacctcagcggccaacggccaatcggcaaagagatatgaaatatgacgccgtccgacaaccaagctatcaagccgagctcaccagtgggagctcaagacccgcgtcacaaggcgcagacaattattctgagatctgtcgaccggaaaccgtaaaggccatccacaaaaatgatggctccaagctcgtcgaaatgcccagctctcaaccaccacacagaaaccagtcagactggagtccatggacaggaaatctaggcacagatccggttttggtaaagaagaaaaagaggaagggaaaagcggaaaggctcttatttatgtccccaagtggggccggtaagattttatggcgctagcctagatagggatagtgcaatgtgatcacatcacgtgatccgattgcggttatcaggaatccaaacggcgttgcgctgatagccattagtacctttccatccctccttcacacaccgtcaaaatggcggacgctctatccatcgagcaaaacaacaagattcgagtggctcttggcctcaagccactcccagttcctggcgccggccctgaattcagagaagacgacgacagcgagcccggcgaggaagaagacccagccagcactctcgagtcgcgacaggcggaaagttatgaaaactggaagaagatccaggacaccgccgaagcgaaacggaaacgagatgagaagaatgccgccatcaagcgggcgcgtgacattgcccaacggaatatacagctccaaggatcgacactaggcgaggcgaatggcgacgaactcgataccaaagcctggctgtcacaatccaaaaagcgccagaagaaaatcgagaaagaacgcgcccagagacttgccgaggaactcgaagagcgggagcgcgttgcagaagccgagtacactgcagcggatttggctggtatcaaggtcggacactctgcgggtgctttcgatggtggtgaagatcacatcctgacgcttaaggacgccgcggtggatgatgaggaagaggacgatgagctccaaaacctcgatttggtcgagaaggaaagaaccgaagagaggctggagcttaagaagaaaaagcctgtctacgatcccacggcggagaaccagggtctcctttcacaatacgacgaggagatcgatggcaaaaagcgaaagagatttacactcgacgcccaaggttcaaccgaagaacgcgaagcaaagcgacaggaagtttccaaccagttgcggaagaacattatcagcctcgactttgaaccggaaatgccatcatccgattacatggacatcagcgaagtcaaaattaagaagcctaagaagaagaaggccaaagctacaaaacagaggactttgatagacgaggatgacgttgctccggttgcggattcgaccgatacacaaggatcttcagctatggatattgattcgaagggtggagtcccagtttctgctccccgcaagcccatcaacgaagatgtttctttcgtggatgacgatgaccttcaagcctctcttgcgttgcaacgacgagcagctttcaagaagcgcaagaagatcagccctgaggagcttgctaagcagcttcgagaagaggagactcagaccccgatggatattgaaaattcggataacgagggcgaggggcctggccttgttatcgacgaaacctcggaatttgtggcaaatctacacaagcctacacttctggagcaagaagaaaaacacgctacaaccgcggccaaagagcgcgaaagttccaacgcggagcccgagggtgagggcgtcgagatcgatatggaccgttacggcgatattgaagacgaagaggaacttgctgcgcgcatcaagcgcgatgaagtatctgcggcccagccaccacaacttaccggcaccggcctagaagaggaatcaactctagaccatggtcttgctgctactctatcaatgttgaaatcgcgcggtctcgtcaaagacaacgacagcaccagccaaaacgctctcatgcgtgatcgccagcgtttcttggccgacaagtcgaaccgcgagtccgaaatcgagcgacgcgcccgacagcagcgtgagcgggaccgtacctctggtaagcttgatcgcatgtcagcccgcgagcgcgaggagcacgcgcgctgggagaacaagcatcgtgaccagcaggaagcacgtcatatcgccgaggtgttcaaccgcgaatacaagcccgacgtgcaactgcggtatgtggatgagttcggtcgcaacatgaaccagaaggaagcattcaagcaacttagtcaccagttccacggcaagggcagtggaaagatgaagaccgagaagcgcctcaagaagatcgacgaagagaagaagcgcgagtctatgagcacgctggacagcagccagaacactggcatgaacactgctgtgggcactgctgcgcgcaagaatcgccaggctggggttcgcctgggctgatgctttttctttcttcccaatagccaaataccaatttacgatatccaaagtctagcccaaaagtccttccgaagctccgtagatccgcagatatatttagatagttatatttaggcctgatcagttagacgatcaggcaacgttgctgtagggagaagacggatgtcaccaagttcaatcttatgtatccgacttcgtacatatgggattgacatacaggtatttaacccagttgtccctatacaaccttagaaaataatcaaggtggtcggaatgtcagacacgaggaaaaatggagaattccttctccaactgtgaggggaaaaacggtgtagatccagacagatcagttcaccggagattcgacttgccgacaactgtagaaatgggctgatgttgctatacatgcgcgaatggatatatataaggaacgcacgaatgaatccagccaatgaatcatatcctaaaccctagatatcattacaattccctcatctctagcaactaaatcatagagaacaacaaatatttagccggaggattgctgcaaattccgattggttgtacctggtacctccacccaggcggagatgcataccaactcgcaggtacccgataccgctatcacatgagtcagggcaaaaacatcgggactacgtctccggtcctttatattccttcgctctcccgatccttcccttcctccttccaatcccaaatccaggaggtccaggtcttgccctttcgattttcttcgtctactctgccattatgctttccactttcagagtcgccagccggtcggctgccccccgtggggtcaacttgcgtaccgtcttgatcggagctagaaacgcatcggcctgggccaatgttccccagggtcctcctgtaagctttgtgcttgcaaccaccgtaatcgtggtttgaaaggccaattctaacgtagctcggttaataggacgccattctcggtatcaccgaagctttcaaggccgactccttcaaggagaagatcaatctcggcgtgggtgcctaccgtaagcctcgtcccgaacaatcgtgtcgcgtaatggattgctgacgagtcattccgctgttttaggtgacgacaagggcaagccttacgtcctgccctctgtccgtgccgctgaggacaaggtcgtcgcagaccgcatggacaaggagtacgctggcatcaccggtgttcccagtttcactacagccgccgcggagctcgcctacggcgctgactcctccgccatcaaggacaaccgcctcgtcatcactcagactatctccggcaccggtgccctgcgcattggcggtgctttcctccagcggttttaccccggcgcgaagaagatctacatccccaaccccagctgggctaaccacaaggctgtcttctccgactccggtctcgaggtcgcccagtacagctactacaacaaggacaccattggcctcgacttcgagggtctgattgccgatatcaaggccgcccccgagggcagcatcattctgctccacgcttgcgctcacaaccccaccggtgtcgaccctaccgaggcgcagtggcgtcagatcagcgatgtcatgaagcagaagggtcacttcgccttcttcgacatggcctaccagggctttgccagcggcaacgccgacaaggatgcctttgctccccgccacttcgtcaaggagggccacaacatcgctctttgccagagtttcgccaagaacatgggtctgtacggcgagcgtgtcggtgctttctccctcgtttgcgagaacgccgaggagaagaagcgtgtcgattcgcagatcaagatcctcattcgtcccttctactccaaccctcccgttcacggcgcccgtgtcgcctccaccattatgaacgaccctgctcttaacaagcagtggctcggtgaggtcgagggcatggctagccgcatcattgagatgcgcgctcttctccgcaccaaccttgagaagctcggcagcaagcacgactggtcccacatcaccagccaggtgagatctcaaaactcgatttcctaagtatgatccaaatgactaacatgatattccagatcggcatgttcgcctacactggcttgaagcccgagcagatggacacccttgctaaggaggtaagatttatacccgcatactttctctagtctgatcgctaacgactcccctagcactctgtctacgctaccaaggacggccgtatctccgtcgctggtatcaccaccggaaacgtcaagagactcgccgagtctatcttcaaggttactggttaaatgcaaaaccgcttgaaaagaaatcttgaaggatatacgataaaaaatgaatgttaggggagtgagagaaaccgggcctgggtttcgttttaaaatctcggtcctcttgtactgatatctaatgtctctgtttcaaattagcattgttcggctctgtccgtcttaacggggattttggattcgttttctacattgttcttttcttgttcttgtggaaaatactctgtaaactcatgtagtccattgctctctcatcggcattataactttggatttatgccctgattaggcttacagcccgtaatgaattatgtacctatgttgtagatgagaatcttgatatgctaactaaatggggttagtcctggtgaaatttagccctaagccctagttcgctcgatggggccgtgtcaccgcgtgacttatgtacatagtcaccccacaaaatatttgaacattctattgatagttcacccgttacttttttctcagccaatcaatttcttccgcatccataccacaatggccccaaaaagaaaaagatcgacgttaccatccaaactccgacgatacgattggcacggcatcgggaccctggtccgagcgcatcacggctagaccagcgaggcttatccacaatgtccactgagttggcggacgattggtcgactctagcagcaaaagcgcaggcacgggtttctcaatacaaacctcagcagcatcagcaacacgcaaatttcctccccgtgtccctaaatgcatttattacctggctacctgaaggtgggcgtgaatgtctggctagggacatcataggttcaaaatccgacaacgaactttatgatatctttagcaatttgcttacaggtcctgctacaccgagtgagtctaggaaatacttgtctagagtaacatcgagcactaatcaatcctcgggattagtgagagcacgttcaaagccaccatcagtcagcccctccccgcacgcaaaacgcgaggcgcatgttgaggctgtagcagccacgcttacccaaccagaaaagcgaacgtcacagttcaaggaactctgtctcaaacgcgatgataatcgttgcgtgatcactggcgaactagacattgaatactgggaggagcttaaccgcccagaggaaccctatttcggacggaccgaaggcgcgcatatcattccgttttgctatgcatcatgggaaagcgccgaggtattatacctgcagtgaataaatgattatatacaaatgaaatgataggatggcaagtggaacctgccggcaatgggaggttttataccgctgctttccccttgtcagacaagtccaagaaggaatcagtactgaaacaatcaatgacacctcaaatgggatgaccctacgcgcgaacatccatgacgagtttaggagatttaccatcgcattaaagccaactgtaagtagccaatggcacatcgtatgtattacggtctgatctcactgacatacaaatgcggcattaaaaccaagagaatatataccaatgctttcccgcctccctatacgagttagagcagtagcactgcccacaagtggcaccatccacttgacgcaaccgatggtgcgcaggacttaggatgggacatgttattgaccgttatctcagagactgggaggacatcaagtgcgaggccacaaaatccctcgatgaggctgggggaacaaatgtcaatgagtttctgcaggctggtctgtgggagcatgttcttgcttgaaatgacaatcctcgtgcctttttattcattaaagccaatgatagcttcccgcactcataggccatccatgtcgatgtagagatcacctttgtcaaggatagaggatgtgtgagtgactagctttacttgaccaaattttggatggaatagtacccttccaaggtctaaaactaggttgataggaccgatcttaactggcgtgggtcgagacatctcctgaataataacctcgtgggaagaaaaggatatagatatagtcttagatagacaaaaaaacacattgccgggcatgtcattaccatctctatataactatactttcagcgagatcaagtaccttaatctcttccctattccaagatttgttctaggagttgagtaactatctacaagacatggataaactaactaagccaaatgcgtacaaggactgtatgcagccaacgctccacagtgaatcaatacagcctagaccgcgccgatgagtctgtacgacacataatgtgctggcagcagcccccctccgccctacgttgcatctacacaccgttctttccacgtcgtctcactggttaataaatgaattgccaagactcaatgtactccagctatagagcttgtaacagtcatacccaccttgatgcaaatcgggcctgagttaagcaaggatctacaacgctgcggctaggctcattgagtagcttggacgacctcggatgtccacggatatgacacgcctttactcaatccaaactccaaagtggcttagaaagagcacctagcgtcatatgacggggcaatattagctacatgcctgggcagttagagtagtatatgaagaccgagaatgtggagtgtagtgttgctaaaatggtaggcagaggaacaaattcaaaaaggaaacatgtattaagaatctgtcagttttggggtaatatgcaatcgaagagaaattttgtccagtgaccccttccgcaacaccaagtgcgccataacttccaccttttagaaagccaaatgaatcagtatcctatcattccgctgacgcctatatccgagccagcgcccagaggtccgagagagggacagatgcagcctggaggtgcattagcggcagagtatgggtaccactccggggatggagaaggggtgacagatcggcccatgacacgggctaagatattagcaggtgagtgggcagagccttggcttgaattgagaagagcgaagcggaggaagacctcggaggttgtaacaatgattgaaatgacgatgaggacaatgataatccaagtttggtctagagtgaggttagctgaaaggttagggagcgaaaagagaaggtcagacatacgggaagtgcggttgtcggcaatcgagtcggacaagatttctgcaagatcgaggaatacgcgacatctctcgttgaggacctggatgcgtggtttgatctccaaatactcgcgcacggcgatgtagagcgggtaaagggttggctcgctctcccagaagaagttggggacgtcgagcatattagaagctagtggaaaatgttagtagggaataaatcttacctgcagcatagcgtgcaggacgacccaaaaagggggtaaggaacttacaaaggttgacctcgacacgactcttgaacaatcgacccaagatccggaagacttcttcgcgcttcatgcccagttggcctgaaactgcaagacgtgtggggacgtctttagcatccgccatctgtcgggccataacttcctcgaagaagcagagtttagtgctctgtgcaataccatggctaatagcgagcttgatcatgtggtcgccactgcgaagagtaatcatatcgttatagactcgcgggcgcgagatctcagtcgaatactcgaaatggaactcttctgtctcaaagtcctcctcatcaagaggcatcgtcgctagagggatagggataccagttgcagatgatgttgcaaatgccagatcggccagcaggtctttctcttgtcgctcggtgaagttccagaagacgacaacgccgtaactgaaaacgaacatttcagccacattgtataacgtccgagctggggcttgcggtgttgaagacgaggaggatgtaggggctggcagagagggacggtctcgaataaaagtgtgggtatcatccgtgctgtgtcttcggcggcgaagtgcaggttcaggcgaagattgcccagtcctttggttgctgtctggttgcgggagtggcgagatatgctgcaacccatcgacactagagccggagctggtagcttgttcatggtcatcggggaggtggccacgaatgtcttcactgacaccattcaagaattccgcatgatttccctcctgggaatcatgaacctcaggctgtggcggcgcttcataatggtgctcatcctctggacgattgtgtccaccaaccgagtgttcctccgtctcaagcatatattcatcatgatgatcacgaagttcattccgttcaatctcctcatccaacaaggattttccaccggggtatttcagcacagggctactccgcagacgatacccctcgtggcccggcaaaagaggaagatgatacgcggtgtagagacaatcatcatagagctttgttcgcccaccatgctgctccttaacaaaagtagcaagcgatcccatcttatacgcctgggctgtacagtacgccgtaacacgcgcaagcttttccgtccggcgcgcctttggcaatcgctctgcataactcttcgcgcgctcaggagcaatacggcgtttcttcatgacttcttcctcatccagcaggggtgcaaaatcattatcaatgccgaaatcacccccaagtcgcttcgacacaagcaattggcgtctgatcctttccgggtcgatatttttctccttggctagacgcgcgacaagctcctcgtccacgaggtcggcaccatcggagtcatcgtcttcttcaatttcaccctcctccagttcgccggtgtcgggcagaagaaccagcttttcactgactttcgtcgttcgaggcgggagtcgcggttgcgcggcgagtcggcccatcgtgccgccggatcctgctgctgtgctgctgcctgagctagttatcaagcctccagatgcggaggcaagacggcgtgcccgtgaaattggtggtgggccgcgctgctgcattgaagggacgtcagaggcgtattggaggacgttgtcgacggtgatgaatcgggttgcgggcgagcggcgtcgtcgcggtatttggggctgttgctggtctctggaatctgtgacctgtattcaaaatatgtgttagttgagcttggttgtgcggttgatttgatagtcaatcctaccaagacagttgggctgcgctggctagtccctcgtcctcgggccggcggagtcattgtcaaacgagcttagaataagcgcttgagtatgtttgtttgtaactatttgccggcactttccaacatagaagagataattgaccgtgtatgtatcaattgctatgtctgatgctccgagccagcaagttcgaatggcctcgagactaaacccaactgggaatagttcattgagcgaccaaatgacgtctactcttacagtcacgtgcatctcattcactaggtcatcccgtgacactgccacgtgctacaccgctcaatggatcagggcccacagtacctcattgggactagcagattgcagatggcgttttggtcgatctggggtaaagtgaagatcggccggaagctggttctagtgcttgttgactacaaaatgaggtgagactgaggtattgatattttgtctatttgtgaggtctcattggtttccgaggtcaatgtggctcttgactaactgtttgtgctcattggtggcctagctatccgaaagcaaagtgctagaacatggaaggaaaattgggtaataataatatgaattgctatggtaacgatgagagatatgagagataaacataaaaacgccgtgctgtcggttcatttggcactcttccgagggcgaactggtcatgcagatgggatagaagagaataacgaaattagattacgaatgaaggccatcacgaagctgccgatcttcgtcccagatttccttcttcatgcgctgtagatgaatgtgctgcttttgcagcttgtcgaggtcgacttgaggtggattggggagcgctgcaagggagtcatgtaggttgcggtacttggtgtaaaagttcttgaatttctgagatttctcccgcagctgctgtctcagaatttcgtagctcattggtggagatgcactaccagtgctgccaccgctggaggagctcaccgctcggcgacgcttagcttccaagtttccagtaggacgtcccgcctggggcgcggacaattgatcagattcggccttgcgcttcaatgggttggtggtagtggaggtagccttcgcgatgccattggtctgtggagtagctctggcaggtttggctgcggcagaggctgcacggcccactttgggtttggccagctgggtgatgagaggcgaagatgaagatgaaccggaggattgattctggctgtccgctcggctgcggttgctaccggtagagtcgaacacgttggaaggaggggaggagccgagtggagacggcttctgcggtgaagtcgagggccgagaggggggacgcttggaacttgtaaccttggcagccggtttggatggttcaagcttaggtttcgatgtctcgggtttattcttgggcgccggagcaggagcagatgagactgggggagtatcggcggtgcgagccttggacggtgccttgattttcggtgctgggggcttcgaattggatggagtccgcttgtgttccttcggttgctgcttgggtgcaggcgcgggagcgggggcgggggcgggggcaggggaaatatcttgcatgtcggtatcatcatcttcgtccgaactgtggacgaattctgcggacttgatcttgctgtccactttgactggggccttcccaccagtcttcttcgtaacccgtccggtgagggtactgttggtattcttgggtttggtagaccgtttcgtcgggtccttgtcgcgggctttttgtgaggccgaagcagtcttgggagcaggcgcggatccctttgtagcgcggtcggtctcattgtccttgcccgagtcttccccattggctttggcggatggtgcggcaggtttctggggtgggccagtacgaaggttcaaacgcgaaaggcactttcccttgcctcgttcagcctttggaagcagtgtttgccaaagtttgtcggaccgagagatgcgcatgcgatcgaaggcagagatagaattctcaatggcctctttccggtcctcctcggtataattgaaaccaaacacatcaagatccttgtaaactttgtccttgagatcatatttctcggggttgattcggttcagaactccgaatttctcgccgagggcggtgcaatcgtcgacggtggtgcgggtttggcgggcaaggaacttggccgagacggcacggacagcgagaaggtgaatgaagggaaccttgagggcttcaagcctcgcacggtctttgttctccatcattggagcagatgttggagtcattgcaaaagaaggcgacttgggagcacccaagataggacttgcggtgagggaacgattggcagcagtcttgaggaaacgatctttctcgagctcgactttggtggtgggacctttgtagcctgacttgctgccccgaagagccttcagctcatctgggtgtgagatgatgtgagtcttcttcgactcctttccccgctcatgggcattcaatttttcctccaaatctgccagcgcctgatcggtggccgcagtggcatttttagccttttccacctcgaggctatggctcaacaccccggtgaagtacagtgtctctttatcggatgagctgtggtagatctcggatcggtgtgtttcggggtaggcatggaacatttgagatttgcctccgtagtgaagtgacgggtgttttcccagccggactcgagccggttgatccttccgtagactctggatcagatcatcgagggtgctctgcaccaaattcaatcgcatgatctggtttggcttgacagaaggatcaccggactcatctccgaggtggagagacagcccggtcgggggaatattcagactggtcgacattatgggagtggaggagaggtcagggtagggaggaagggagagggattcgagattgtgagcagggtcggatggcagcgtgagagctgcaggtcaggcggccaactgcacgagggaatgaggtaaaaccatacgccataagatcggcgttgaaaatatggaataagaggaatcaatgcagaatgtaggatgcaaatggtatagacagagaagtgaagaagaagaaagatgaggagaagggcagaaaggccaagagcaaggcgaagcgtcggagagtggggagagctgacggcgattccttgtaaaattacaggggattttcccgattttcctttttttttttctttttctctaattaattgtccatgtacgggtattctcctatgaggaagtacgaagtacgaatgtgcaaatgtgcttatgctagtatagtattgaagacttgaacatatcacactcctaatgctctatttcctccagtccactccgtttgatactgtatcggcctttgttctgactccaagtccaacttgtaaacttcttttcttcctttttccttctttcccctttgttctccgaaacccactacataagtacctgactacttacaactatcctactaatatatagtcaactccaatatatacacctaactactccgtagactcggcctacacctgtatacccaatcgtaccaagcgcagccgactactcgcaatctagacaattactattacaatacaattaccgtgaggagaaaaaaagcgatgctccatcacggggcttcccgagtccagtcttgtttaccgatgcgggtgcggtcgggtctcatttgacttccatatagattaaaggttcgtaactatgtttggttaaagaactctgacagcaggtctctctaacggcttgggttgactcaacagacagctgaatccaaaaccctgggagaaaaacattccattctttctccaaaaatcacccggggtactcatcatttccccgagatacctcaggaatgccacaacctggtttgcccctcgttcatatgcacccaggcacggatagccaacccgaaaggtcccagttcaagtgttaccattcaatgtttcgccctacatcggactagtgggcttgctacggacgcttactcctttcgataggctaacgggaaacggggccaattcctcgtaccacatgttatcgggctcctattctggctacggggtacttttagcctttcttgcattcgactatgagatgacccgggcccgaacggcgcaaatcaccatagagtggtcgtctccatggccatccccaggctatagactgaatgccacctggtgttcctcttccttattggatcttgagtttcacagctgcatggaaggtccatttatgcatcccaatggagcaatggagagcaagccattaggctccggggtgtatattgtactccgtattacgcccttcttattttttattccttttttattctttatccttttactctttctgttcctttgcagtttcgcccccatgttgggtgctggactggtcaattccagtcgatcccaatcaacccaaattaaataacagtggcaaacccaaataagatcaagttacagttacattgcgagtccagtataagcagtgtacacaaatgacctgcatggcctactcaacctgggcaagtgtaattcttcataagccggagaggggaataccgtggatcccttgcgccgtccggcttattctccaattgtctagtctgagacaaggggaaatattagccattgcccattgtttgccttgctcgatctgcgcagatccgtgcagaactgtcggctccgaaaatcctcttcgtcatcgtttctacctcgtattcaatggctcaggacattatcaaactttgaagttgataatcagattaaggactctatgaatttggaataattctacaaatctccaatatccaattctgcaccccaaattaacccatcccacaacgacatcgtcaaaacttccgcagcctcatcccaacagcctccatgattgcctcactaccaacaccccccgcgatcgcaacagggtcctataggatcgccgccgtgatcggcgccgacgataacgccctaacaaaaccccaatatctgaccgcgatagccgcaatcgccgttcgcgctatgaaccctaccaagccactgaccgtcgatggcaaaatggacacgatgtctccgagttggcagataccattacgcaggtaatcgctctaggtgctgtaggatataatctcgaagatatagacgcgactggcgtgctgcgatcggtaaatgaggctacggcataggttggggttgttgtttattgtccaggcggcaggaaggctgggtttcctgactttgttccataaggggtatagttaatgtgacgatgaatttgcaagtggcatttctgagggtgaacaagattcgggggttgggcgttgcaaggtttagtattgggccggagttgtggcgaactgctatgaagacgtttactgagcgggccgaggtgtcggccttgtgagtacatacgctgttcttgcctacacaaatacatggatatattacgtttgactcataggttaggcattcaaacgtcatgcagcctaaaataaaccgtcgagctttaattcaatataacatttgaagtcattaattgattccgagtacagttgctgtcggcatcggcgatcctgaaccatcaggtccggctacaaatcccattggtgcagatattcccataacagcagtgttcgtcgacaacgcaaggcccattgtcctcgctacaagacggccacctatcatctgtcgatcggcatttgttggcagcgcagtagcccgagcagcattgattgttcggggtgccgaactcacaggatgctagtattaattagtggtacgttcaaagttgtgattggatgtgatatctcaattcttacagtagactcccgcgcaagtgggtgttgggacacaggttgtgatagtcgttgtagagggtgagacaaaggttgctgttgtgcatgtctcggtgagaacgcaagccggagcactaccacatcctcctgctgaacaagctgctgcttctattttgagggaaggtgtggttagtagggtgggggcgaatgtaggtgtttgttgggatacatacggctcagggcgaggtgagcataggtaagaataagagccttccagagatgcatctttctggcgtagatatttaggtcttagttatgcgagaacagagtgtgctcagttgattagagaaattattcagtaagaccttctgtcggtgtctatatatacatcacacaccaagacatacaaatgcgtcaactctagggcaaaccgtggaacacacggccagatgacctgatacgaagccatctacatcagttgatagtaatgttccaagctcagaccattagccactaccccagactttctatttctgccacggtcgatgtttctcctaacgtcatatcaatacgagggtcaacacgaggacttcattaaactcatattcaattggccttcatgtgagacactattcatcattcaagactatgcttccttcggttttgttcctgttttcctttttatagcaacgtgatgactatgatgttgctgggtaaaattgccgactagtggaatcatgcttggaattgatcacatttttatctcgtatcaaatcatgaattaataataaatctcaaaacacatgttagtatatggcacatgacaccaagcctaaaattagcccgtatagagaagaaataaatggcaagaattcttcactatacgactcgccaacctctatcgaatgaacgagttggtgcgacttgagactctgtcccgttcgaagctgccagaaatatgttcaaatcttcaaatcatcctctgggtcactcactccaaagtaacggacatattccgttgattttagcgtttacatcaccgctggatctgatgagaagcttcaacatcggcattcaaccgcaagccactgcacaattgatcaatcctccagataacaggttgcatccttctgaagaattgtcccgagggtactctcatggcctgcgagaagcgcactaaccgcgggatgggttggtggggtccaggtttgctcgcccacacagtcgttcaattgagccccgtgattcaggagcagaattacaacagcatcatttccagcgctcacggctatactcaggggtgtctctctttcgaaatcagatggaagtttaggtgaaatgcgatatggggacctaggggccggaagaggggtccgaggtagaggcccaagaaacctaggtggaaagcggcgaatcggttctggttttttgactggcatggatgggacatccacataggccccccagtagagcacgcctctttcattttccttggcaacacatttaagccttggctttccgagcacttcacattttgttgatacagacgggcaagaagaaggtcgtataggtgatagttcacctgtagtaggtgcgagagatccacctcggatttcagattcgtacttatcaagagtaacaactcattgggtagttcaagtaacgaaaccatagggttgaaagtgatgtgcgatatcaaagagtacgaattagaaaggacgtcagtccactagcgcggggctgtgtacgggctaacacaagaactaaaaactgccaacagcgcacagcgcaggtgcgtgatcgattcagaattggagcggccccaaatgttgatatcattcctgttgatttacttcaaatagtgcaagacgatgttttagaaccttcgaagtaacctcgacttataaagatagacacaccacatttctgcaccgccatggtggttgctattacactagattactggcctggtatcgagtgacaggcttttctaagaagtcagtgtctcctcatcctagaatattatagttcagatccgcgttctacaactttagcggagaatatgtaccttttatatgggaaacgcatacaaaagatacctcgaaactgtatggtttctaacccctccaggcctttgggaattggggtcgcgaaggcgagctaggcttttcgactaaatcccaactccgctctgccatcaatcgggaccaaagtttgacattcggttctcatggctccccgtaatccagagtgagtcctcgaacatgtgcatctacatacgacaattagcggaggcattaaagtcaacatacgaattctgtaatcggcgaagctaacacagatcaccagcttccccgcagtccgcgcctgcattttcgacatggacgggcttctcatcaactctgaagacataatcagtctatccacgaaccaactgctggaaaggtatggaaggcctccgttgactccgtcgattcgagcccagctcatgggtgtcgcagactcgacaaatggcgacatattccacaactgggccaaattacctatcttccgcgagcgattcgcccgtgaatcaagcgagggcatgcgactacatttcccggattgcaggccgttgcctggcgcggagaagattctatcgaatctaagccgtgcacggagtgcttcgtctggggacatgattcagctggctttggcttccagcactaagacccagagttatgagttgaaaactgcggggccagaatcgaaaacactgttgagcttctttcagtcggacaggagagtcttgggtgatgatccacgcatgcgacggggtcgagggaagccagcgcccgacatttatttgctcgcgttgcagtctttgaactcgggaatagactccgaggaaaaggctatcctgcccaacgaatgtttagtcttcgaagatagcatcgctggtgcagaggctggaagacgcgctggtatgagagttgtttgggtaccgcatccagatgtggcggtcgagtatcagccgatgcataaagtcatcctggctgggagatcaggaagattgaagttcggaaatgactggcagctaggagagattgatgatggctgggcagaaattatacctagtctggaagactttgattacgagaagtacggccttgatgtggcatctcgaatatcttaatggaacagttccaattcaatttgatacctgtgtaacggcaagaatctgttcccgcatataaaaagaagaagaagataaaagaaagaaaagcgttcattaacgggcccaaaaagcaacgatctcgtcaatgtctttcatcgtcaagctcttcaaaagtcgatgctccttggtgatctcattcctcaggcgacaagcaaatcttaaggcaatagaagctttttgcatcttgcccattgccgccaacaagtttcccttgaggaaagtagtgagagcgatctcattcttatgcgcattcggatcaatcgaccaaattcccaacgcgtcgttgatcatagcactaaaaagcaatttggtagcctccggggaatctgatatagctgctgatgtatcctaagaatgtggggataaatcgctgcacaggcaggctatctgcaaccatacagcctgttgccagaggatttgggttgtggtagctctggcacgatactggtcgctgttgattaggaagttcatcgagttttctgggcctccagccaatctagctacttgccatggaagattatttgtaatgtaggatattagattaaagatcttactaaatcctgaaccctaaaatagcggtctcgctaattagatacgggtcaacaatgatagatgtgttttcttggctcggtgttgatttctattgggcagacccagtccatcggcagttgcaacgagggctcgcaaacaccaaagtatatcgttatgcagtggccgcaatatatcgatccgcggaaaggaattttgggagcagttgtgggcagtcggtctcaaggagatggatcatgacagaatcatctctcacccgcaagtcacccgcttcgtggtcaagtccatgcaccgaacaggtcttctccggcagtctcaatatgtgggattcgttgaggccgacgacgacgaggcgacaggtcttgctgccatggatttaggtttgaagaatgggtattagccaatgacgataaatgatgccgtgatacgggaaacgcagccaaagtcgacaaccatgccaatcaatcggccagggtaacatcaacattaattgaaactggggtaagaggaggacaggaatgagagggaagtgacaagtaagaagtcaaagatggacgttgcactccacggcattcgttatatctttcttatgcataggtttgtgggtttacaggctctacggaatagaggaatgggatgattccatactcttcagtaatcagcctctgctgtatgctcttttggatggatggcgcgcagggtctttttcacttgattggggcctttgtgcctgaaatttgcctggcacaaaagtaaggatacctgaattaccattacctacctgcgaatatgaagcctttggtaccatacaaatttaaatatctcaactttcttaggtggtttactggctctctccgttatgcgtaaagtaacttaaattaactctactattaccaataatagatatggttcaattccaaaacagtcatttaaatgctatatgatagagagaaaccaattgattagatacgaccggtattttatcataattgtagtgaaattgtagacttaaaattctttattgctggtaatcgtagtagtagtggtagataccatttgaattacttcatggtgatagttttatatttatatatgacggagagagctagtaaacgactggaaaagtcaagataggtaaatttgcatggtgccaaatgctctatgagacagctggcgtagatggaccctaactcggcagactcaagtccttgctttggctgaataaagcgcctgaatcgtcatatgtaactagatttactgcaacaggttggttatgctttgattggttgacgattgattgattggtgcaaattctaacaaataaccgaagtagccagatgaggcacagctcatgtttgcacggatgcttggtctataagccttttaactgactgagtcatacccgccagaacctttgtcatgagctcagccgtcatttcatcgcgaagcacgattcgcatgacttcgatgtcttccccatgtgctccccatccgcgaattgtataatctggaacaggtcaatggaagatacatcaatggagaaccggaagcgactgactcggaatagagaatttcaaatcgtgcattgcatcactgatatccgatagctgcaggttaggatactgtcgtcgggcctgatcactaagtctaaataccgcaattgggagcacatgaggaacagcttgatcacttcccttacagagcgtataacctccacctgctttttgttgccgatgagcatcgcttaagcaataaaaatacccagtctcctccaagagtacactcaaacgacgagcccgatcgagcaggctctgggtcctatcctggtaccctgcaagccccaatcgaaggaagttataatattggccagcgataggtgcaccggatctcgagaagcttaaggagaaatcgctatgggttccccggagataagaagattcgactaggaggccttgtggaatctgtgatttttcgcgccaaagtatccatcctaccgcgagaggtgccatgccgaatttatgtcctgatgcattgatagattggactcgagaaagacgaaaatccctatcaggaacatattgtattagctagtaataatcgacggagggtagatgtatgtttaccagacgaagttcgtgttggtggaagtaaaaggtaaaatgaagccaccacttgcagcatcaatgtggatagggatattatttcctgttcgaagctcgtacgcgtccagtacgtttgcaacttgctgaactaaatcacaatgtccagtgtaggtagatcccatagtcaagaagacaccgactaagaaaagtcagcactagaacgatcaatgagactggcggcatatacttgtattttcatctaagcgatcttccaatccctcgatgtccagtgaatatccacttctctcactgacaggtatgatcctggcctcgacgtcaaaataaaacgcaaatttattgacgcaaacatgcgcatttgccccaattataacattgggacgagggtacaagtgattggggtgattcagctgccattctcgtttcatagcaaggccgccgaggaggacggattcagaagagcctgtcgttgctgcaccgaaaaagccatttggggcgttccaaagatttgcaagtatagagaggcatttttctcgatagctagttggaataaagtgtcttagatgatcttctcctgagtcataatcaggccaacaagaattactcactctgctaaggacggatactcatgaatgcatgcttggtttcgtagaccaccagagatcatgagatcgatagcagtctcatcgaacttggtagttgtgaatcttcatacatcagcaattctttcagttcaaaattgatcgttcagcaacttacctcccaagatcatgggatggaggtatgtctgcggccataacagtttctgcaaatgctctcacagtttcaaccgagagtcctctatcaggcatatagcccttagagggcagaggagtaggagatctattggaaggcatgttgagtagttgaaatgccaatatgtagtataaggttgcgtcgaatcaatgctgagtgtagtatccagacaaggggtactgcttcggtaacttatagaaacgtagattatagtcagatttcagagacttcatgacatctcccttaaaaaattagttcaaaaatattgctcccaatacatgacgcagatctcagaatctttgccacaatgctaacccccttaaaagctgtactacacaccatgtaatcactgtgtacaatatcatatgcaggttcgaaatattacgttatcacattaaacgtagatgacatcaatcttcttcgaggatgttagatcgcgcaacaatgataaaagatcgatttggagatcgatctagagatcgatttagactaacgccatttttagcgtgagatatgatcaggggttgtgtgtggaggggtctatttgtcatccaattacctcttacggtgatttgctgggtttgttttgccgggtgttggacagaccacatgagctttacaaagatcataagcgctgtggacataaaatcgagtttgaaatgacttaccatcgatggcgcaagagctgcatagactgcgggtcaacaagcgatgttcgaatggatactagaaacttggtacttggactgtatcatgctatttgcacccccagttacaatcagggaactttctaggtaattctgagaggcattgggcacacgagatgccttgtgcggataaatttcccgcaaactccttaatggtggatagccacaccatggaagaagaaggctaccctgcaaaggtcagtgaacgtaattgtaagtctatcatcccctgtatgaggtgattgaagcgtttgattgtgatctactcaagccgggcgacgatctcccgtatgagcactcgtgagcgtggcccacgacagatgacttccgcatctaggccatgatcgagacaattaaccaagagcgaacaaacgagagcaatcactggtattggttgatcagcaacctggaagttgtgttgttcacggatgcagattgcacagtttcagtgcattggataacttctccactgcaaggacgacgagacaattcttcctgaaagggcttcatacatgtctttgcgtcatggtagtcgcgtaataagtatttttcatccatatttgtcaagttcgaaccagatgctaagtgtacatgtagacagccaagaaacgaacgccttgctattgatcatagagacgtcatacaataagagataggcaagtgcttgaagatcaagatcgattcaatggtcggtgtaaagctatataaagtcgaggttcagactgggaaaccatcaattcaatcaatgtgctgctattgttgatgatctttcactatgactatcgcggaccacctctacaagacagatgatgagactcctcatgctttcgcaacttgccatcaagccaaactcagtgtggacaaatctcaatcaaatgacaaagtggcaacaatactagctgcttggtctgtgctgttgcgagactactatgcaccgaacactcccactttcagttaccttcgaccgaaacacgaagggccttgtgagaagaacaaggcctcatctggagatcttcagagtcaatgcctgtcaatttcaacgaacggtgatctcagtaccagacagttgaaagatgcagcgtcacaggctattgccgccgatgattggggagacttcactaccacgaaacagaagacggctgttttggagtttcccaatgaccaaactaaaccccctctcgtggattttgagcagctcaaggtatggaaactcactggatattccaaatctccattagcgtgaatcagagctaataggtagtccaggttgaagtgctgctagtcattagtactcaacaagacagcatatcagcaaatgtgtacatcaacagctccaaaagaccagagctcaaaccatgcgccatactgaaaagcctccagattatacacaaaaccctgacgagcgagtcgtgcatcaaagttgataaaataatcaccatcaccccattcgacattgaaaggctgcacgagattaacacaatgaaacccgaacaaaatgctcgtccagaatgtctccataccctcatcactagacaatgctcccgacaaccagcaagcattgcactggaatcaaccacgcaaaagattacatacgaagaactgggaaaacaatctgctactatctggaaggttctgatgcacaaaggcatcttaccaggagaaacggttggactctgcatgaacagatcactttcaacagtcatcatcatgatcggaatattgagagcaggtgctgcgtacaatccgatagacccgtcgtctcccctggaaagaatctcccaagttatcaaaagcgccaatgttcaacatctggtgaccgatgaaatgctgcttgataggttcaaggacttcggggcaaatctgatcatcacaccgaaggattttgagaatgcagagtgcccagaagactggcaggaagacaccaacatcgatgcttcaaattcagcctatgtcatcttcacttctggcagtacgggagttccgaagggcgtcatccatggccacggatcagtctctcttagcctttcggaatgtattgaaaagctccagattgattcttctaccaggttcatgcaatccgcaagtcttgcattcgatgctagtatactggaagtttttgccccactagctgctggtggatgtctctgtatgatttcacaggaagagcgcaacgctgacctggaatcaacgatgcataagctccaagtgtcgcatgcctggctcaccccatcaatggtgccacacatccagccagagagcctcccaacccttcgaagccttggactcggaggtgaggccccaaccgctgaaattttgtcgacatggggcgagaaagtccagttgaataacatgtacggtaccaccgaatctggagtctgggatacagtgaaaactggagtaaagccgggtgacaacccgaaaaatgttggacggagcatcggcaatgttgcatgctggatcacagatccttccaatgtgcacaaattgatgcctgtcggtgcagaaggagaactgttgatacaaagtccatatctgacacttggatatctcaacgactctgatcgtcaggccaaagccttcgtgacaccctcatccctggaatgggcttccctaatgcctctaatgaaaggatcccaggtatatcgaacgggagatctggcgaaatacgatgaaaatggcgaggtgattctcttaggtcgccaaagcggctacgtcaaaatccgaggtttgcgtgtggacttgggagagattgagaatgcaataaattcatgcatcaaggttggccgctctgcggtggttctatatggacgtgaagccatggataccgaaattgtggcgttcattgaaacatgcaatgaccagaaaatccaactagctgaaacgctttctgggcagctgtctgaatttctacctcaatatatgattcccactgcttatgtgcaagtcgatacattgccgcagacgttatcgaagaagatcgaccgacagaaactccgaactcatctatcacagatgagccagaaggactttcggagatgtcgcagtggtagctcgtcggacgaagaattttccgaaatcccagaacaggagaatatggccaacgaaatcagcaatatcattgcagacataatcgagaagaaagatgaggagtttgcatcttctatccggggtcggaacttttcccttgccagagctggcctcacatccatgcaattggtgacactcctgaacgtgattcggaagcgatatgagaagaaactcaacatcgaaacattggctaaagatgtgactgtttgcaacattgcagacagtctcacgggaagaatcaatatgaaaaccaaaaacagtccccctaggaatctgattgccgatctcgcaaacttgaactcaaagcttgacttcatccagactcgcttagcgactgtctttctgacatctatcaccggatttctcggcagccagatcttgcgggctctgctggaatgtcctgaaatcggatgtgtgattggacttgttcgtgccaaggatgaaaaagaggcacgcagaaaggtccaggagtatggcgagcttggtcagtggtggcagccaagctatcaggatcgccttgaagtctggacaggagacttaagcagaccgaagcttggattggaggagaccaaatgggacagtctgttaacaacacacccaacaaaacgagtcgactgcatcatacacaatggtgctcgagtgaattggatggattgctatgaggatctcgagaaggtcaacgtccaaagcaccattgaaatcctcgccggtctttctaaaatgaattatccctgcagattgatctacgtctcgggtggatacatgccaacagagacagagagtcataccgaaatcgccagaaagctctccgaggcatcagggtatgatcagacaaagttcatgtcccagttgctgttggccgagtacaacagatacttggatcgggaaaccatcaaaagccaaaaagctcagactgtgataccaggattcattgtcgggaccaagaaagaaggaatcgcgcaaccagaggatttcttttggcgactagccttcactattacacgtctgaaagccgtcagtgacaaactcgattatctgacggttgcgggagtggatcaagtatcccgtctcattacagatgcattcttgcagccggaaagatatacctccgaagcgattcattgcaccgatggagtagaattctccacattctgcgattctctcagcaagctgacgggatgtccaatcgataggatggaacatgacaaatggatgagactactgcaagccgatgtcgaagaagcagactttgatcatccgttcaccccggtgctgaaatggtttcaggagaacacttggcagtttatggtcgcgcaagacgatatcccgaagaattgttatttcgacaagaacgaaatcgtcctggccctggagagcagcttgagatatttggtggatatcggatatttctcacacgatgaggacaaggaaaatcgattgtcgagagcccctatcttcagccgatccaggtcctgacagattcatttgatcgtagatagcactccgaattctgccttatttgggccaatttgattttttctgccatgtattctgccacgtattctgcctacttctagtttatatagtaaaaagacatgcattttgatcagaaaaaatcatgtattttgcctgattcctgtaggatataaccccttgatggatgaaatatttgatgataaagcagttgatgacgaagttactgatggtgaagtagttgaggaagttgatggtgaagtagttgaggaagttgacgataaacagttgatacaagatatggcaggtgtgacttaattttgttaggagctcatgtacgaactgcgggtacctgctgtcttggctactaactataatatgcaatttgatacaaaagcggtgtacagattagcaggtactcaaacaaattaggaaggcggtactgagcaacagggaaggtgcgagcaacaattccccggtaagacctggctcttgacaccctccaggtggccgaaagacttgctcaccagataaagggttcgacgacatggtggtttcaaaaggttgggagacgagaaagaaaagacagagcaaagaattgggcttaagttcttagatacaaacaatgatagtatttatataacagccactcccacattccccgtccccaaagatagtggctctaccacaaaatgccaccatcaagatggggaaaaaaacgagagaaaatgaaatcgagagagggttcatactcacactagtctcaacaccaatttccttatggccgtccaatagcacaaacgcaacaattatcaaaacccccaccgatgaagccacgcccccatccattcctctttgatagcaccacatttcgttaaaggtaaccgctttttgctcaaagtagtatccataacaacagatctctgattggcggatatcagcccctggaagaaaccaaggagacttataccacagacaggtgatcgggagctttcatgactgcgagccttgtcttctaaaatgtctacccacttctgcagggtaacaacctcgagaggctctgtcgagcgaagtcgctgggccagaaatggcacgaactccgtgaaaggtacatgggttgggttcacgatgtgatagtatctggattggggagcctcatgattctctccactaggagcattcgagtcacacacaaggtcggacaaagcctcagcggcaatgtcaaccggcacccaatcaatctgattcgcagagccaagactatctggaatacacccaagctctaccgagctggctaggaatgttgggaaccagtcgcgtcgtggccatggcttttctgcactctgctctttggtcggtccggaaatctgcccaaggcggcagattgtagttggtagattggtcagctcagttgctcggtcgagcagtaagcttgcaatgagtttgctttgtccataacctgtctgggcaagttctgcaaaggcgagcttggcttccggaatgggttccgacttttgccaatttttgacagtagccaccgaggagagaaagatgatctgcactttgtgcttggcatcacaggcaaatttaatcagattactgacacctttgatgtttgtctcgaaggatttgagtgggaggttgaagtttacttcccattggcaatgaaggatatccgttacgtctgccgaaagatcatgatatatgagatctggaattccaaagtgaggctctgtcagatttgcctccagctgctcacactgagcagtactgccttctcttaggactgtttgaatggttggctttgagtcgggggactttctgttgacgcaggttacctttctcacatgtttctggcgcaacagagcctccaaggtgtgtgacccaatgaaaccagttgtcccggttagaagaacatgtttactggttggcctgttccgcttggtcgttgtggcagtagtggcagttgggatttcgtgtgaatatctagacctcagatcagaatatattcccatcttgaagagaaccgcaacctgcctctgccatatttcatcaaaattttcttgatccccggactcgcgaaataatgctgaaaggcttcgcaaaatagaccttccaagaagaagtagcgttggattgccatatatggtgcctatctcgaccttccaccccacatcaatgtcatgcacaggctgagatgcaagtttgttgttgattgcagccgtgagcatctgcgcttgctttgagtccattccagcagcaaatatgtcatcatctgtacccaagtgagatgtatttggtaaaatcttcgctatgaggtgggcaagaccagaagtcagagactcttcggatgtcaaatcgaggtccaagtcatctaggttaggttgactagggatagagtgagagctatatagctcatcaatctcggtcttgtattgctcaaggcttttgttgcggtaaattgttccttttggtgttcgaacaaatggcttctctttattggcaataagaatcatggactcgtggatatgactgtcacggctgctgtttgaattttccatatccaaggcgtctttcacactattcttcaccttggatgaaagatttgagtaagagggttctgccttgtttataccttccacctcgagtattaggcccggatagcgttgcttgtttccgatcacaagagcggctttaataccgggaatacatcctaatcggctctcgataccaactggattcatcttttctccagtagagaaaacaatgatgtcgtcaatcctgaacccgtatttccacaagtctggttcagtcggatgctttttgaagacatctttggtgtgccattcgttcagctcaggaaaattgtgaaacacactttgatacgactcaagggaacggtcacgacgaatgaccatttcaaattcaggttcgtttccttctgcctctgggtctattggtcgccaatgaatgccattcaagggatggaaatgaaaataattccaatgtgacggatcattcgaatattgaatgaaagatccacattcagtggaacccagtccattgaagagttgtgtcttggtgacaaccgtgtcccctttcttttgactgatggaacctacagacatggtactgtcagctaccgttcatcccttagggtcaaaacagcctaccccctccagtgaatatccatttgaacttggatgcagagttcattgcctctagattttctgatagctcttcaacaattgacggtggaagaagagctccatctaattgagaatctctcatcgcaatttgaagcatcaatatactcggtggccggtggtagtatccaaacatcaacgtggttccggagaacagaagataggagcttagcgcgaatcccgcaacatgaaacaggggaaatgcgacatagacggttctggcatctgacattatctctagctggcacttccttcctttcgggtcttgttgagagattagtcgctgggcgtcggaagcagccaatgaagaatggctgattggcacgagtctgggtattccagttgagccggaagtatgcagaatcttgtcaaagtcagattatgtactagaactgaatcctttccacgggtcttaccactgctggagtcgagcgaagtgtggcccatgacccatcatatggatagttctttatctgcttgggtcctcgaagtagttccactaagtcctgaatttgaaaagtctgtatgcttcttgtttttgagatctcatctaccgtggaagaaaatgtcgactcaaagaccatgaccgggctattcgacagttctaggagatatcgagccattgagatgctgaccctaggagaaatcaagagggcctgatctcacttataagctttgacattacttggaagtagtgaacgcggattgcgtacctgtttccccatcttcgtggcaacgagagagatcaaaagatgtctgaggtcacttggtcctaaatagctgataacactgttagaatcgaggctatatttagattctttagaagtagcgatacgtacgcaatgactgttgagccgttgggcttgatagcgaggttatcaagttgccaggataaatagtttatcgcattgaacagaccaaggtacgaaacaataacctcatgtggctgattgggctctgcatgctctggctgaataagttgttgaatagctgtcttgtcaggactatttgaagctgttgcctcaatatagttgagcaaaattcgactacctactcgactctcaccgtgttgggtggtacattgcttatttgatgcagccatgactttgataattcacaatcagagtgagaatgataatgataaccgagttactatttggattttgtgactgacatgcttctgtttatagacacgctgctgatcaggtcacgtaatttgtattcttggaaaaagcaagacttatagccaccatgtcataagccatgtgatctttttgactcgatgtcttgtaagaaatcttacatcatttgtccaacttgatcacagactcgatcgtcgcctatctacgatggcgaacattaaattcaaatgcgcatgcgcatacgtatgaacacgaaatagtggggtttaaatatgcatcgtaaccccatgctacaaacttctatgtagtagaagtgagtcatggcgcaagtgtgtacgaggatactccgtcagactgcatctaagcttgaaccttagaaatggttccgtggctgcttctataaaagaccagtggggcttgcaagaatcctgatgatatctcttcaattattctactcacgaagaatacacacattagaacaacaacttacttttttaagatggaacacacactgtgcgtctttcgtggatctagtgacggcaagttgatccaagatgtgatcaaaagatcatttggctccaatgatgttcttcttgaaatgacacacgcaagtatatgcgggacagatgatttgtttttgcactcgccccaagtgctcggccatgagggtgtgggtgttgtcagagagaaaggccccaatgtgacgtcagtcaatgttggtgaccgtgttggcgttggttatatccagtacgtgtgtgggcaatgtgacaattgtacttcaggtaatttcttgtgttttctgtaaagcccgagaagttccgcagttgaccttgttatccaggctggaaccaatattgcttccgcagacaacgctatggggccgatgaccctcaacaaggttgtcttgggaaccaagttatttgggacgcaagtggcctcatttgcatcccggagaaatgcagctctgccaatgccgctgcactcatgtgcggtggagccactgcttggacagtcttgacacgctataatattcggcgcgagcagcgcgtgggtattattggaatcggtggcatgggccaccttgcagtaaagctatctgcagccttggggtaccatacagttgttttttctcgctcgaattccaagaggaatgattgcatggcgttcggggccaaagagttccacgttcttcccaaggatactgcggtgaaggaatggtacacgactgacactgcaaaatcattttatgggaaagtcaagcctgtggatcatttactcctgtgcagcaatacatcggaggactttgccatgctcatgaatttggtggctactcacggtactatctatcccttgacagtgagtcttgattctgttccagtgccattactggccatgatcgacaacgcaaccagcatacaaggatccctgacggcatcaacggaagacatctccagcttgttggagttttgcgctgcgaatgatattcacccgatggccgaaggccagttcctagaccaaactggtgttgaagctgcttttcatgcgttgaaggaaggatcggtgcgatacaagactgttttggagaaaaagtcagtttgctagatagcttggaactaagtatacattttattttagtctaccgtcctcgcgacccgttccgatttattacaaatttgtattttatattgccaatgaagatttcatttctcagtccgacgccgtccggtgggccgatctaaccaatctatgttgattgtttaactagtcttgcccctggaatagactctggaagtatctttcaactgaagttggtatgacttcgggaaagaggtcattgtgcagttgaccaggaggtctccaaaatctaccttgaccttgcacatatcgtaacaaaatccaaaaatcaacagggaaggtgcttcctttctgaagcttttccggcgcggacgatggattttcgagtatccttttggcctggtcgacggaagttgggttgattcgagctggctttctggagtaatgacgcagaagtcgagtgatctcgttgtaagagatataatcacttcggaatcccaagatcttattctcggatctctctggatggttgatgctggccacgaggtatttggcgacatcttcacaagaggagtagtccatttttgcgtctgggtctcccacgcactgaacctcatagccatcattcgtgatagcctgatctttttccaaccagggacaaagaattaactcgtcctgtacatcaaagagctcagcgcacccaataacggtgtaggtcatatggccactctgaattgcggggtgcttgattgcattgtcaaggcatctcatttttgcggcccagatctaatcaaaatgttagagcatgaagccagaagacgatggaacttaagagacttaccggatgtagatatgccccttcgccttcaaaccaaggtatctggtgcattccgaattcgctcggatagaatcgtcgaactcctgccattgcagccgcgtcttgaataacaccttgtttgttgataacttcacaaccaagcgtgctaacaacaacactgacatcatggctggccatgatctctgcaaggtcattgctagtgacgatgttgaggtctactctcttttcgatggtattcgcctcatcaaagtcgccgacttgaaaatcagaatttggagaaacgaaggcaaggactttcatttgtgcctctttcgactcattcagtgctttcaaaacgtgtcttccgatctggccattggctccaaacaaagcaacagtgtagaatggggtaatcatgatgaatagatcctggaggttgactttgttggccgatagaagagtgatttagtagttgatatttcggtaaggtagaggtaacagtgttgaagtacttttttgattctacttgaatagatctgaaaagggagtgtacgtgtattaggggtagtacgaacgccatgtatgtgatggtggcaaaccctcttcggacattcctgcaagtgaggcgagcccaatttcttggataatatgcattgaacggtgagaaaccgttgataccatcaaataatttgccgatctctgtcatatatttggaataccaagctctcaaatggggtatgacatactaggagctgaccttgcggcaagcgcgcactatcgacttccgaaatgatgtggagaccagcgctgtgtgcatagcaggtttctcgcctatgtatgatctatactaaatcgagaattggtatctccccctatgtctgggcgttatctgctgacgatcccgttcatagcagaatactctatctgctgaaacacttacatggttttcttttaccattgtccaatgtggtctgtgtctgggttttgagcttgcttaggtccggtatctgacggtcattgttcacatacataggattgatagggcgagggcaaaatggcaatctttgatttcgttggcaatttggctatactgttgactcgaaagactagtacataattgatttaatgagactcaatgcgcacacaagtagaaacctccaagctatcctgtctaaagttagcatattattcattcaacaacgacgatagtttactcacaggctctcctgtgggctcaaagctgtctatcagtgtgttttcatatactagatatggattaccaaaagacttgttcgccatcactttgatatcgaatgagtcctgttcctgttgcatcttgatgactttctgacttgtggtggattgtacgtattccaagtagtcgggaacaccgggagagatcacattgtcggcaatgacagtagtgccaggaccaatgagaccgagctcttcgcagagcttcaagtcattgacatactcccgcttagcatggtcaatgaagaaaccatcaacagcaccggtagagtattcttgtcgcagttttcggagagattctcgacaaggaccgacgcggatttcgacaatgtcgtccaactcggccagctcaacaagcgcactggatatagcagcaaatttagagcttgcctcaaggctcaaatactttcgaccgctggtcttctttagggcagcaccaaaaagcaaagttgagtagcccacgtagccgcctatttcgaccatgagatcaggctggagtttgggaatcaagtcttgagccacaattttccctttttcgatgccgacattcatcagaaagtcggttgttcgaccatactcatcaattgcagccaggattctctcggggtttccctgcatctcgtgatatccagcatgagcgcagataaattccagaagtcgctcttctcggccatcgtcatgctgatgagttgtcagaaagaacgtccagtcctgaagaaaatgaaaaatgagaacatacgaatataacctgctcaggcttatagaaagaaattggatcttttgtcatgatggtttgttctcaaaaattcggtttggtgtgtttgtgagataggtgaagaccggccaggcgagtcgaaggataatttgagacgtgctgcaggaattatatattgttctcctgcgagctggacactgcttactagtgacttcgatcaagtttcaattatctcacgtcatgtgttgtgacagtcttcattttcccgctctgacatcttgcccatactacttggccttgatttggtttttgtgatttgaaatttccaattgcatctgggaaacggtccttgcaagatgcaaggatagcatatcttgtggctcctcaagtacgttcatttgatggcgaggaaagtgcgcactctatcaagtccgccaatcgagatcgaggagtaaatatgttgcaaagtgcaggttccactcacacaaataagcccgatctcgggcatattcaaaaaggtttcacaacatcggcttggcacggaggtcaatatcccctccacgcatgaagactccgattcgaatcatcacaactatgtatcaagataggtagcactacgctcgggttgagcagcctgcctagcagccaacagctcgatgccgaccttccctgattttgatgatttcagccctaattaggaccagtacagactgacagaaatcgagcatttctgtgtcagtgcctaaataatgattataagaggatcattttacaatacacagtaacaccataggcgacttatattattttcagggctggactatcgaaatctgacatgccccagcatggcgtttgattggctggatcggtgaactcggatcgcgctacgcaatttcatcctctaacgacatgaagcgtgggcaaagaatctccttggcatcgaaaatattgatcgttggctttgaatcattgctgatttgctatcttcgcagcttttactagagcttcttaggttgaaccagacaacaagaatctttaaaaacttccgtggtagctattgtgattgggaaactgtctttgttctgaaaaagattatagcgttgggggccatttcaaaatacaaaaaaagactcgtgtgtgggatctagtgcatcacctggattgccttggacatcggaatggtagccctcccatcagcaatagccatgtaaatcttcgtaatgtttgttccgatcgtctccttctctcttctgctgtcatcaacaccgccccccaaaaagccagggtgatcaaccaaaccccgatgaaatggaacctgtaaagcgtgtcgtatccatatatgcatctccctcgttgctggtgccaagtatttgggggtagattgacaggccaagaactgtttgcttgtattttgatgatcttcaatcaacgtcaatgtaacatcggttgtccatttcgggattaatgcttatgaagatgggtctgtatcggtgcgagtgtaatgatcaaaaatcaaatgtgcagaatctcgtgccacctcttcacatcgactctctgtctcagattgattgtgtctatgccaggaatctgtgattcccatccatagatcatcgaatgccacagcacggtcggttttgggccagatcttcttgtgaagcgcagacagatgtggctttgctatgtcaaagaaatcctgattcaaggcacgtagatcaagtgcttggcaaaggacatagaaatgtgctgcacacatcattgtcaagatatcaaccgagttggcagtatatctagcagcaacaagagctagcgagttgactgattggttgttcatttcggcaacttgcacatggctaacaacagagttgccaaggtatgccagttccgaaagataagcagacatgttgatatcgactcctttgcaagtgaaagagaggctaggatcatcgaagcaaagattaggtggcaaacccttgttgagaattggatttataatttcctggcattgtgaggctactagtcgtccaagcatgacgatcgcagtcttggtcttttccatggcacttgacacagacgcagcctgaaagttgccaccgtggtggaaacggtctcccgctacatcgataagaggattatcggtagatgagttcagttcagtcgtcacctgtctatccgcgagcatgagatcttcaagcagaggaccaatccactgaggtgccgtacgcaatgcgtaccgatcctgtacgaggccttgctgtttgacgttcattttggtgcttaggtgagacccaatgagaaatgatcggatgttatcagccacctcaatttgtccaggatgtggccgacattgagaaatgaagtcatggtagttgtcaagtgagccttggagggcttccgtcgccatcgcggtcagtagttgcacaagaaccccaagattatgagcatcatgtagcaccagtgcggcagcggcggcgctcggagcagttccgttcattattccaagagcttcttttgcgtccattgtcacgggtgcaatatctgcctgacgcaatgcatctgcagccgacatcactgcctcgagagtctcacccttgacctgcacggatatccctgtatttccctcaaggagcccaccaacataggaaagtggagataggtcaccggacgccgaaatactgcctctcaagggaataataggcgtaattcccttgtttagcgcttggatcagcagttcgatcttgtccattcccacggcggaatgaccccggatgagcgagttacaacgcaataaaattgcgcctcgtgtcacatcctccggtaatgcgtaggccctgtcgtggctttgggggagacccggtagaattccagcctgatgatgttgcagaaatccttgttgtagtattttgagtttcttcgttcgcttgttggcatttccaccacatccagtattgactcctgcaaaaatcgataatcagtacgcattcaattgagatcccaatttatagtttaccgtagatgtcctccccattgttcaggtggatgttaagtgtgtcaatactctcctgcacacgtttctcgattgaaccagatttcgacaaagagacaatcaccgaaaatctagtaaagaaatattagacctgcaatgtgacacacatcaagctagtagatggactagtatacctggccactgcaacaagctgtgccggctccagcgagttctgatcgccactcaatattacgctttcggtttctcttgtcttctcgagaagactccaggctcgttgaacatgttccaggtgtctcatcatcgtgtactgtttcctttcgacagctagggctcatataaagttggtctcgacacaaatgatctgatgaagccttggtggtttttgaattgcaagataggccagacttttcactccttatgtagattgccattccgcgctaaggggaccgcgatggagcctaactgatccacatgcctcaatgggcttgtttcacaagtcacgtatagtatcatcataatgccatcatcatgcgagggggcttgttgggttcttgcagtctcatgacttgggctctgcctgcagcttgcataatgatgtggcaatgagatatcgagtttagattccaactatttcaggatttacacagctgattaatatactaaatttatatgtcctcgagatatatatacctacatatctacttgaaacacgattgcagtaccctctaatctagtgatactcaagtccaatctcaatatgacacagaatacactaagcaccgatgttctcattatcggcgctggtcctgcagggtatgctttgttgtccaagaaacaaaagtcctactgaccatccaccctaggctcatggccggtacatggatggcacaaacaggaataaaggcaatgatcattgataaaatgccatgcagaactcagcgtgggcatgcagacggtattgaaagtcgaaccttcgagatacttgatagttttgggatggcagatagcatatggaaacatgccaaccgcacaatcgacctatctatttgggtaagtactggatctaatcatttcttgttttattatatagatatctcctatccttaccctagcttagtagatgagatttattcgctttttctgattattgactgactgtgcgagaatagaatgactgtgaatctgatggaattcagcggcaatgtatctcaaataactgtactccaggcctctctagatttcaagaagcaacattgggccaaggtcagatcgaagaaaatttcattgactttattcaagagtcgagctcggttgaagtgaagtggaactcatatccagtcgatttgaatatgtgcgaggggtcagattatcctgttcgagtgactgttgagatgagaacatctgaaagggaggtacgccaaattgaactacccatatattggccctcctatcaactttttttctaatgagaaattagcagacatcttatactgtcaattcaaagtaccttattgcgtgcgatggagcgcacagctggattagaacggctcttgggctcaaacttgagggtgaccaaacggatgaaaagtggggagtgattgatttgatacctctcacggactttcgtaagctttgaaatctctcttacaaatacagtataaggaacacttgctgataaaccctcagctgacatccgcaagcgatgcattgtgaagtctgattatagccagttaatgataatcccacgggagcgaaggcttgttcgatgttacgtccaattgccacatgaagtagctgcagtgctctggaaggaagtggatcctgcgttactggtaaacattgtgaagaagattttaagccctcacaccttcgaggcctcgaatattgaatggtcaaccatctacactgtgcgtaaatccacaaacactacatgcggtgattatttctaacttttactgttctcctaggttgggcagagactgtgtaccactctttcgatgtacaaccgagttttcttagctggtgatgccatacatacccattcaccgaaagcgggccagggcatgaatgtcagcattcaagacacgtacaacctgggctggaagctagcatccgtcatcaaagggaaggccaagtccagcattctacacacatatcaaaccgaacgccttcaaatagcaattcggctaattgaattcgacaagaggatggtccagggagtctttcagatggactcggcctcttctgtggagaatgcctcatcgatgagcaaccagatgcaagacactcttgaggaagagaatggatccgcatcaggagtcactgccctctataaacctagctgcttgatcacacgatcgtgggattcgaagggtcaccagttggttcgtcctttgctgccctatagcaagattgagctagccgggaaattggctgttggtgccagactgcccaatactcaagtcttgtttcaatgcgattccaggccttggtctctacaaagggttcttcgcagcactggagagtggcacctttttatttttggtggtgacgtctcgatcaacacacaaatgacacgcgtcaaacgactagcatctgagctttcccgagatgagaccttggtcaacagaatcaatcaacgagaccatgattgtgtcggcaaaatctcaacgtacctagttcactgtgcacctcggaaaagcgtcgacttaatggaattgccaaaactattcataccattcgatgaaaatttgggttatgactactggcgcgtgttcgctgacgaggaactgtactccgaaaagcgaggtagggcatatcaacaatatggaatcggggcggagggatgtaccgtgctggttcggcccgatcaacacgtcgctttgatcgggactctggatgatttcgccgcgattgagctatttttgggtaatttcatgactctagtgtagatactaattcttctcatacacattcgagcttttttgcgacaaataaaccaatgataaagtggtagctgcggtctgaggatggttcaggttgtcctgaatcttagattcgcaatattcacatgggattggacctcgaaactccatgttcattctgttcatctttcgtctcacattccaaggtttagggttgtacctacacgttagctaatcttactgctatacctaggtagacccgcagactcatagaatcaagatcaacaggaagaccagggcgagatgaaccttcggggatctagctttatggcaccgaatttcataccggcgaaataattcctccgagcacagtcatacacagtattaacgtcttcagctcttttaggatgtaatttactgcgatcaccgcccccgagcagcgaaatcgaggatcatgaggactctatggtacaaatcaaagagtgcatcagtcaagcctcctcggaaactcagcgttactaatattgagacatgttgccagctgcatgctccatgcttgtggtcggcgccatgttgcctttcaaatttaccacatcgtcactgcagttcaacacggcgtattgaggcaggtatgcaactcatggaggccggttgtgtatagtagcgaagacaggcggtatttttcttcggaagacaaccacgaaatattgaagatccgagatgctgatctgcaacgaatgggaggtaaaagaggctattggctagtcgaaaatcctgagcatggtgatgttgtgtcccggatccgatcagaatttatggatatcctgagcgtactctgtcaccggaatcaggaagtagtagtaggtgctcaaccaagttgggaaggcgtggaagttgctatccaggagtgcgagcaacaattccctaaatataagactcagatatatcttctctcattatacaactatgaccagttggacaaagggcgcataagagcctgcacacctcacgtcatcagtaattcagtcttgaaatgtttctcaagggtagtgaggctaagcactcctggccttgcatttggtgtgagcgtattatatgatgattcgtcaagcaaggtgggtgaaatgaggggtctcacctatattgtatacatatggtatgtgtgtagcctgccgatctcttctattctccatggtaacaaacgaattctcattggcacacttgtcgataaaatgggtagtatcgtagccccagcttctggtttacttaatccttgatttggacatatacttagcaaggcgaggtagcttcactatggagaggtatatgaatcgtcaaatattgtgagaaccaaaccaagtctaggctaatgaactatctagcttcaggttttacacagctcctcttatgcctcatgccaggcgtagtctcgactctccacgtggcacctcacgaatcttgtcttatattaattataatttgggattaattcgggtatgagaagggcaaaagggaaccttttgacccggatttccttgtttagtagatcatagcttcacctgataagagttcttcctcctcatcaccttgctgagctggagacatgtctcgatttcccgaattcaacaatgtaaagtacaaccgtggagactgcaaccttgtagaaatgctcgtataatcgaggaagaaacgcggcaatccaatatcatcggtctatcatacagaagtgcaagcgctagtgaacgacaatctcatttgaaagatggtaatcgtcagagagcagcgaaaaagcaagtgacagcgtaagcgacagtcaagagagtaatggtaacataaagcaatacaatgattagatgtatgagacaataggaatagaaaagcaaaatgaacaagcacgcataactaaataaatcctaaccagacaccagcatcaggagtctccctaaaacaaacccagaacctttcccgaacccatccatacccaagacaatccctagtccaaccctctatctattccatggatgcagttcctcatctgatcgtgtctcggtagtgtcacccgcaagcatttaacaaaagaaaatggggttgcaagggcaagatgacatcttgaaacaaaacaataaatcgcagatttgaaacacgatcagaccgtccgactccttccagtgcgctggttcccatcaatataaatacaaacggaataagaaaatgcatgaaaaacaaaggaaaataagaaatcaatcgagaggcatagatgtattctctcgtgggaatcaagggcttatgcaatgaggttattaaacaaaggaaataacggaaaattcaagctgttgcgagacacttgtgtcggttgtgaatcgcatcatacagcagtagaccatgtgtggtcacctcgaggtttcatttcgtagttctccggctcggtgctggtaggccgacgaatggtagagttgggaaaatacatgtgcggcggcattgatgtcggatacgcggggccagtgggctcagggtaagtgaagtcgttggctgacccgggcgatggcatgccaccgtgagaaggcgaggcccatccaagactagtcatgtgcggactgccattcacgctattaggacggtgatcactgttggctggaggctcaagaggttgaggcagaccgtagggatgcgatgtcatggatggccggttgtggggcgcactgccgtagctggacagcgaaggagatgtcgcagtcggggaagctcgggggctcccttgggggaaatccccacgcacatgaggcgggatagggccgttgcccatgtagtagtcgccggcagagcggtgcatgttcagcggcgggagctcaccaccaggtgacatggacgggtgatgcgcgggtgacggggtagaatggatggaagcgtgctcggaaaacattccttcgccaggacgtccacggtccttattttgtcgcaattgggcctctgtctcagcagcagcttcttcgatagtcccggtgtggtgattttggtggcgtgtcaacgtcgtgcggcgcgtgaaggtcttctgacagttggcatacgggcatttgtagggtcgcttgccagagtgaatgcggcgatgtctggccagcgaagatgagtcgctgaagggctgaatcaatgttagatttagccagaacaaaaagaggaaagttacacaccttgccacatctctcacacatgtggggtttctctccggtgtgtacacgggagtgcactgtcaaggccgagcgttgaatgaactgctttccacaccctggccactcgcaagcgtgaggtctaactcctgtatgaatacgctctgtgaatcattagcggccgcatctccaaagtttccgaaggatacataccatgtcgagcaaggtcgctacgccgtgcgaagcccttgttgcaggttgagcagtggaaagtctttggtggtgggtcaatacctgctcttccttgtggagcaggttcctgctgcatctggggatcgccagcgtatcccgcaggggcataggccatgtttcgaggggttgaacccgtaggctgtgcataatagaaggaatcgggaagtccaccatccatttgcatgggcgggggaccgtgaggaggatatacattgacgggattttccgggccacctgattcgctcttcatggtgggtgaagctccggtgtgcaactgggcactatgttggaagtactgctgttgtaactgcgcctcagcggcggcggcggctgcagcggagtttttcctgttcaggatggtcgtgaagtccatgacccgacccagcaagtagccaagggaccgcggtcaaggactgctttcgaagacgtccttcggcagaccttccacgcgactagtattccgatgaagtccgatagcttattggattcggagtccttgacgcgttaggacgtaaatgaacagtggaggccgttgggtgggagattcgggtcacaactagcaagctctgcaagtcacggtataattagaaccaatcttcggtacagtagatcgagctcgattctgcagaaactccgcgagtgcgcagctcgtgggaagaccttagaccagaaactcaccctgcgtagacctgtatcgtcttggacagtccctcggcgaagaatgcgacggggtaaattctccacttttctgcagtggaatgcaaggttgcgtaagaggtatcgaacgatgggctttctgccaaaaaaagccaagctcgtctcagagaataatgttgtggtcggctcaaggcggaacgcgtggtcgtttgtcggtgaaggtggaggaagataggtcaactatccctgtggaggttcctatgcaacacaagaaatgtcgatggtcagcatgaaactaatatcaagacgatggttgcgatgccgagtattttccaccgccgtgctgtaagctgattttctcgcctatgctccgcggtcctcggtacgggagaccagtcacaacgccgagttccaggaaaacgaaaaaagaccagaccagcacgtatggggaaattgtccgtgttcacgaaacccaagataacagcgcatggcggagagagttgggcagccaaggcgaacaggcgggatgcgtcatcactggcaaatcgcggtgaaggcaaggagtgaagcgggaaacacacctttttcaacgaagcttgaggtttcaagatactagaatagagaagagtcgagggcgacacaaagagtggctcgagagaatttaggaatttgcggccgggtcaagtggggttaagaaggtagagagacaaagagatcaagaagattggagatgaaatgaaagaagaagaaagggaagcgaagggttaaaaagtagaagatgagaaagggggggggggaggagaaataggaaatattatgattattacatgtttaggtgatttaggtgtggtaggtgccactgtctcttgcatctttgtacatcatttatttacacttggagaacttatttttggcgctctcgtagtatttgtgtattatcttcgtgtcttattatcccggtttcaaatcggacttctgatcctatatggcgtttccatctacatcccacggttgtgctgctatatcagttgcaatccattcagacctctcctaagctgaattccctttctagaaggactagtcttcctagtcggacccagcgaagcccgctagaaggaaacctgaccgcaccagaaggatccacaacgtgcccttctccccgtgtggaaatggatccaaaaggccgatccgaacctgagtttccttgtgattattattatccgcctcgatatagcctcctgaaatttaatctctaaatataccctggagggtggtgtttattcccaggccatggctcaaattaagcataggatcgggctaataaggaaccagatcccaatgttgtaatatacggtgtagcaatgcgttaatagagtcccatatacagtatgaaagggggggggaggggccgaactacaactgacaacccctgaagcgaaatagaaaatacacgcatttctcatccggattttacgattacgataaaaacacaaagaataaaaaagaaaaaggaaggaagggaaaaggcaaaaaggaaaagaaacaggagacatcgatcaacgatgacatgcaagtttctcatggtgcgacacattgagtgatatacttatttttatacgatgcgaaggagattacctcgataatctacccggctgttagccggaaacatcgcaaaatcgagattgaccttctagaacagttccgctatcacaatggtaaccattcctgtacgtacctcacgccgcatatatgggttacacggttggtaggaccaactgacttcgacctgctgttcttctctctgtttcccctcttcttttcttaggtacgcggactctgacgatcctgcagtggagctaatccggtctgcatcggtaattactcaacccctttcccttccggggcctggcttcagcctctgggaatccactccactgccacaaaaagacccgtggacggcacggatggctctgccaagccttctcctgaccttccagaaggacgccagaagcattttggaacatccgtagaagccgtggaagccgtagaaggaaaaaaaaaaagacatgcgcggcgccccgtcctgcgcacggttcggagccttaccaggagatcatccctggctgtgcactatacccttcacatcgaagaattaatgtacgaaaaaaattaaacagagccatgtatctgcctagaggcaaaacaaaatgaaacttgaaaaaaaagggggggttgggcaccaggatgactggtccagtcatatcttgccaggtgacttttcagggctattcctcttcattggcatgatcgtctatcctcttacgctccctctcacacacacacacacctaccattatgtgcccctcgccgggctaatgcacaccctaataactgtgacgaaagtgacggcacatcctgcatatgcacttgcgcttgccgggtttggtctcaacccgggtgctgcggggagttgcggagattatctcccctctacatacaattgctttgtaaataccatgcagatccgtgtaagccgaataaaggtgctggaatctcaggatctgatgaaccaatgactggcaagatgatttattatagttcgccgttgacttccttgattttacgcaatcgccaataaacagaaaatcgaaccaaggcgggtcaggccgacgcacattggatggctggacacggggcgattcccacatggttgtggctgagacgtgtcttggtgtatcgtgtccgcgctagtctccatatttctattagtagaacatttcctcagtttgtatgcccctaggatggagcatgtcttgtacagatcattttggtgtgctttatagctgcctctgacaaattaggtagcatttctaacttccaaggtttacccgggctcctagtgggtgactaggtctatgcatatgcatatcgacctcggaagatcaggcatgccctatttgttgtacgaccgacgtaacccaaaaaaacaaaaccaaacatccacaaaatccaggaacagccgctaacgctatgaccaaaaggcccatttttctgtctcttgtgtcgcagattccactctgatgtcacctttctcccggggaaattgagcactggcccactgatgtgcctttctcatcccgctaaggtaaatagtcacagataagtcaacgctagctcgtctcagcctgctgtgggagtttgactgaaaatcccggtaacacccaaatcctccgtactagagtggcgtgggagctaatgcagatgacattaaagcattgcgttgccccatgctccactaggaggcgactcggtataaaggaaatagcactccgcgcggagtatgttgtagatggatacgggcgacgtggactaaaacaacacgtccttgaatctccatctcttgttctagtctcggctgccttccggggactcaaaattgcgatttggctctgtttgatggatttgattcggatggttactatcaatattagactctgttactctgtatttaccaatgcattcaccaaatcatttcaattatcacgtggtgacatgcatattctagtagagttgattactccgtagttagtataccacagtttcatatttaatcgttcaatagtcatctccaactacgtctctaagaaaggcttcactggaatctctacttatttcattcacactatagtggcgggaataagaatcaattatttaaacgtggaggttcagatatatattttaggagaatgtagtactgtagttcgtcgagctaaacgttcagataatgaaggcctactgactacaagggtgccaggagccttgctaaggaggatttttagagactgtggctacaataatatgacagtacacgttgagaaatggactctactggcgatgttgtatgtactagtccaagtgggttttatggaacccgagaatatttccgctgccgaaactacaaaagtccccaaggtgggattagctcccctcacagggatccaaagccgcgactaattaggaagtggtatgatgatcatgttgaccgcttttagagtgggtgggctaatcccacatacaacatacaacttacaccggagtttaggcccagatggctttgtttttccgcttcggtgctcaccccgcgccgctttttgcctaatgagtaatgtagactgagcacgcccctgagtattacataatcatcaaactcccgaggtcgcccacctcgcatcacctggtagttacataagctcacaccacgcttcgggttgatatgaaccttccaatctttgtctctctgctccttggctgtcctaacggacgggcctcggttcaatttggagggctgccgctgtatccggttcatgcagaagtagataagatcgatggtcttcacggttgcatattcttcaggcccttgttcttcgataccaaagagcagggttgtcaaagttgtccttggactctagcagtcgacccataatctgaataccacagactgtttcttcagaattgtctcttcggtcgcagcagtaggtagagcatttgcatcaatcttaatattgcgtgtgaagttcagacaccctaaagctcatggatttagggatttagggaagtggggccccatatatcttagatctccgcttcttaaaacctcgcctgtaataatactccgtacggagtagatcaaaccgaattgagaagtgtagagaagttgcttatattctgtgctatcattggcgggggtatcaatattctactataaattaaccacccttcttttcctaaaattccattaaatgcggcgcttttattgagcgcatgaatctaaatctggttacagcacgattaaatgttgtaatatgacgttaaaacagaataaatactaagcttaggaagaaagccggaggacttgaacaaccatggctggctatgtccttgtcagaaaagtggccggataatctgggttcgactagggcttttgtatgaagaagtctatggtgtgcctacgtataagagtgctgaataatataagattaatggtaactagctagttaatttttcccacgcttagtctatagtctattaacattgttcaaccggttgttcgcatttgctcttttacacacaaaatgctctaaaatctcagacatgactagatatcaaattgttaggccagaccgttgaatgaatgtgaagaataattgcttgcctagaattaattgaccagggtaattacaccgtcggattaccacttccatttctaaaccagccggcatctactgtccgcaatgcttacatttccgctttctgccctttgaattgtctcggatatccgaatacagcaatggtcgaagagaataatagattgattagttcattatctggagtagcttcttattagcacaaagaagaagcagggtgttcattggatattattagccaaatagcaatctccaccccaaatcacgcgtatttccttatacccaggcactcccaattctactgcaaggattattctacataatggtttattcagccttgcgatagccttcctaccacctcagcctgcacctatcactaagaatggagaccaagtgcgggataacgggatcgttaatctagtcagggttttgagtaaacagacttgagcttgaatattggtgacaccctggtttaaggtacggtgcgcacttagccatcttttcagttcgcaataatcggcttagtctccctggaaaaaggctagttggtcatcaaggcgctcaggcatctctatatctctataagaacaagctgcggccacggtatcctgaagcgtctttcccatttcggtgaggtctgcccttcctttcttaatactactcctaaagcttagacagggctttcgagtctaggattcgtgtctatatccagggtttatagcgttgaagggccttcatcgcagaaagagacccaattgcatacattggtgtaaatatcccgcgtcctgtttccctggacgacactgtctaattatgttagccaaatcgactactccgagcgcaatatatgactctcgtaccccacacggcgagccatcgccttgcacgaaccgagaatctgtgcttaaagccatatcgagcgacactaaacaaccatcgattcgcaggtaacaattgttttcaagagcccacagaactgcacgacgaacaggaatttgtctgctagctgggatgggagtagattccctaacggtgcgatattccgctgggagtttagtctctccatcaactggtcgccgcaaatctaagggcaaataaaatactattgcgccggtggtaaagtttctcgtagagtcttttagtatccatataactactcgatacccttaaccctaactgtggcattgcacaccttctgattgatgcacactaataccaacttgggttatttttaccatgtgaaactggtaagctagcagagatgactttcatcatctgaaagtggtggtgatttcctgacttcaactttcagtgtttcatcaaatgaagatatagacgctcgttagacaatatgtctattattgcccttcttttgtacttccccgcattatctgacagttccatgcttttatttcaaccagcaacgggcaccgtcacacacaggttataaagtttggttacatagacttaaatgaccgaatggtatctatgatcgatactccctacagagtatcgtatatatatacctccgttataaaaaaaaaaaaaaaaaccgacaaaaaatagatgaaatagagtagcaaaagcatagaaaggatagaaagaaattgaccctcgactttggcgtcaccgcaccacactctaaccaaatgagttatggaaccaagttcatgtcattattccgaattttaagcccctaatctgatcacatttccagtactccataaaaaaagaaattctacttctgtcaattgtagatggcatgccaaacgtctctattaggtagtagtctccgttctccacctccctaaagatcaacttgctccggatcaacgtggtcctaactgctaactgcttactccacttgggctcacatccgttgtattggatcgacattcaacgccgatcgatcttcaggggttccatgggatcttcgctgggtcacggcattccctatgccgtactttgtaaatattgtctctagtcctgccaagaccaagcagcctgtagtcgagaacatcgttcctcggaactatcctcagtagctacaatcgtgaagcataagaggtaatccaaacatccatatcacattattcaactcatcagagtagacagaaggtgtatctatcgtctataaataacgaaacaaaactccatgcatagtggcattcctttgcccatgcgcccatgtgcctgaaagtgggcttattgacatagcagaccgcccgtggcccggagaccgtataaagaagcccgtacacattgtgtacatgtacaaggcaaaacaaaaacaaaaacaagaatatttatctcttgcgccacgacagctccaagatttgatcaccgttcttctcatcgcgcatgacataccactgagtgacactatcattctgctcgtggacggcatcctgcaaccggaagctctttttgagctcatccttgcgtcggagcggacccaattcgtgcaggtaagattcgtcattggcgccattgtgggggtcccaggtctgctccatggcgaggtcgttccgatctgggtcggagtgatacttgatgaccgagaacccgtttgtcaggatccagccgtcgccaaagtgccatttgcggagaaggcagctgtcgccgcatagctcggcgatcaccgctagcttcggcatgtcggcgtggaaccaggatttccagtggtgcaccgtgagtgggggctcgcggccggactcgaaaaatccagaggcgtcgtgcatcaggtccaattgccgcagacggtgatccaccgtcaaccgggtctgggtgtagcggtagacgcagatggcgatgcggcggtcgcctgtgaaatccatcgcagagcacttatcgtacacgttggtcatttcttctaagaggggtttggataagaaaacgcccgcgcctccgaacccaatcattccgaatgctgcaatctgcgggatagactcggataatccgccaatatacatggaggtagtgtggtcatatttagcgagcgcatccaccagtctcgacatcgacaggaagaatgtgtcgtcgtcgatgatacagccccaccgggttgtttcccgagcattctccttcaaaagagggatgagtgcgaagtatcggttgaggtagtcatcctccgcctctgtgatgtggaggttgatccctagagagtcggccttggccaagacatcccgcacgccgttttccgagcgatccggttcgatcagtgcgaaaatgcgacagcgcgagtatccagcccagtgagcgaatgcattcagagactcattcaatcgctcgatactggtcgcgactccaaaatcgatgtgcgatgcgtccgccaatttcggaggctgggggacctgcaaggacactggtgtgggaattgagcacccgtctgccgcctccccggtagcccttcgcacttccaagaacggctcttcaagccattgcgtgtagggcactggttcgtctgtcatatcgagtatgatttctcggcgggtatattgggcgacgttgataacgttcaggcttgccaatttatcgtagtcgagatcgcacgggacattgggagcgacggtgatgttggcagctgtctctagcggaatcttcactggctcgaccgagggccatagtacagcggcaaatcctaccacaaacaagaagataactccaaatcgcagcacctttttccaagcccatgatcccggaagatacccatctcgagcaccgaatagcatgttttgtgttgtgagattgtgtcgggttctaccgcattgcggagacaattattttggtctagaacagggcccacggtcgcaggcggatgaagtataatataaatatgtccaggcggtatggcgagagatggagaagaggaagaggcagagaaagaggaagggaaaaaggcagaggaggaacaggaacaggaacaggaacaggaacaggaagaacgtgagactgaaagaacgggaagacaagggtcaagaaagggtctgagacacgatcgatgacgttcaaggtctatttggcggaagtcacgtgtgctcgtatagtacatcgtaacttggagattatatcccggtccgagctggggaaaagacagtataaagatgccagcatggctctattgaaattcctccgtttccatatatactactccgtgctgtcttccttggtggtttgctaatttccgaagtgtacaaagtgcagagcacagccgtgctgatgccaagactttctgaggaatgatcccttcttttcactcgtcggcgatttctccggtccccacatccgcgcgtcctctacccgtgtgctacagagtactccgtccaggctttgatagccaaggcactacggagtgtttggccctagataagcactacgatggagtacaacggagtactttccggacggccattgtggtactcgataacaattggcatttgcgatataaacatttagaccctccggcgcagtggttcacccacccagccccactttgaagatgatattcatgcctcttactggaagttactcgaaaagctttggttgcaaatatgtacggagtcctccgtactgcacatcatatggtatcgaaccgacccagctaccgataccaatgccaatgccaatgctaatacggagtagatccgaaaagaaaacctagtttgccttgcgcattgttttcttggttctctccggatttcgccctcggcattatgttcccgaatatgcatagatggtggtcagcgtagaggagacattgcgcttcaatcagctagcggcttactggtcgctcagacagtctcctttcaacgtcgctatccctaggtattacacccaatcgaaaaaagtgatcaacagacttagagtctgtccacgcgcaaaagcccactgcaacctctacactagatgatatatcttcgcaagaacatatgtgcatttaccattagaagagcaggcagacgaataataggaggagagaccaagttgtagcttaaagcttcacactacgtagtaagtctgggtgacgatgaaaaggaagttaggtttagtacctacagcaagagtccccccccggtctaaaccctcgtgaaattgaagtacgggaaattagttcaaattttgtccatatcaagcttactctgcaagaattggcttatatgcagttttgcctcagtacacactctacaaacgccagtgcttcgagatctgtcaccgttcctcgtggatttgtcgatgtcaaattggagaatcatataggacacgtgagctacggcggggcacatatcgttgagcgcagaaaccccccaatggggaaaagaccagttccgcacattggagtttgatatcagttgatctggggaaattggccactgtgttctttgtattaatcacgcgtttttgatcttttatccgacattgaagttaccgtcttcttcgcccgcaaattatcccctaaaattctcgacccccgccatggttgcgcaatcgctggcttcgctattacagcaagcgtcgattgatgaccacgaggaagtccttcagtcatgcaatgcagtcctcgccaaatccaaatccgacctgcaagcgcagcacatgaaagtcgttgctctgttgaaactcgaccgttatgaagaagccctcaagacgttccaggccggaggcgatgcgctgaagcagagtgcaggtctggaatacgcctatgcatcatacaagtgcgggaagctcgaagaagccacagaagccttgagtcgcacagcttctgggcgtggtgctagccatctcgaggcgcaagtggtaggatgccccatctgtccttctgttgcttgaggaccaatgttgattgtcgtgtcataatagcgttatcgtactgaacacttccgacggtcagccgagatctatgaacaactctcaaaagatacgacagctttcgggcgcgaggttaacgacctgaacatcaattcgtgggctaccgatgcccagcttcaatggaaaggagagacggaattcgtgcgccacgaccgattgtcgagggaggatttggaatcattcgaaacaacctacaacgcagcttgcttgaacattgcaaagggagcgtttaagcagagcgaggtcttgctcaaccgagctcaaagtcagcatctctccgtcttgcctaagactaagactcagactgacgttttgcatagatatctgccggacatcggaggacctttcacctgaggacaaggccgcagagctgctgccaatcgcagtgcaacaactctatgtcctgattcaacttggaaagttggaagaggccgaggcggttctcaaagatatccccgtggaaaagtacgtttaatcgtacctgctcgaaacctattgctcacatcctttcctagcatcaccgagctatcaactaagaagattgcccgtaacaacatcgtcctcgctcgcccgactgccgtcaatccctacatcctatacaaggccctccacgacaccccagatgccaccaataacgatcggctattcgaataccaggaccgtgatgtgattggaaattcgcatgccgcagacctccttgttcaaaaatacgatggtataatccggtctacagctaaggcacagtcaaaacgcccaagtccatccaccgacgccatcaccaaccttctctctgtattcaacgccgcagcacatgctcaaggcgaaaccggccctaaagcccttaaacagatcctcccattgctggagcgacggcccacagacatcggccttcttctgacagtggtacagctctatgtcagcggcggcaacaccacctctgctatcacagccatggagcaaaccctcggcagtcttgagggcccaaacgagtccgtccgctttaacccaggcctactcagcgtccttgtctccctgtaccagcgcgaaggccgcatagtccagatccgcactaccctcgcacaagccgcctcctactggcgcactaagcccgagccccccgtgtccctcctccgtgcagcagccgcctcccttttgcactccgaagaccgcacagacctagctacagcgggtgatatattccgtggtctgcaccagcaagaccccaatgaccgcgtcgccatcgccggctatgtcgcctcacaagcaaccctggactatgcgcagattgagtccgagctcgaccgcctgccggccgtcaacgacctgatcgccgacatcgacgtctcagctctggaatctgctggcatcgctccctccgcatcctcggttgccgcggccgctgctgcctttgctggtgcccgcaagcgcaccgctgctggtgccgatgagcgcgccaacaagcgtgtccgcaagtcccgcctacccaaggacttcgatcctgccaagaagcctgatcccgagcgctggctgcctgtgcgggaccgctcttcttacaggcctaagggtaagaagggtaagcagcgtgctgcagcactcacgcagggtggtcccgtcaatgagaaggcggaagagtctcccgcccagcaaccgcaaaagaccggcggaggcggtggtggtcctaatgctaagaagaataagaaaaagggcaagcgatagtgtaatttcagatagaaatcatagctcgaatgctacctacgatacatggaacacaggtatgtatcttgtatttcatattgaagggcgcctcaaacccgagacgggtagtagaatgaattcccactggctttgtttagcccccaagactccaatctttgcgataaccgaatgtaagcaattcctgtataaccaagcctaaagcaaattttcgagaaaacaccggacgaaggccctctctaccacatcaaaccgtctgttgagcaatcaacgctcaacccagcggagtccgaatggtaccacactggcggttgtagtggtcaaagatcatgagcagcagccgcagatccatgactgcgtcatcagcggttgtcttcgccgccgacccatcaccagccaaataagaatgcagagccatgaattcacgctcatacgcctcatcacaggtactaacagtctccgtccgcttcacacgaggacgaggaacagcattctcggtctcgttaatctgatttccattgacattattcgtatcctccgtcccgtccgcttcctcaacgacaacccgcacataggtaccagtactgattttctcaccaggacgcgggaagtcgtactccacactgagagtcttgtgcgcgccatagagagtcaaatgagcatcgcagcgaggcacggcatcaaccccagcctcatagagaagcgtaaacgggcgaccttcattctcggcggaattcgtatagtgaaaaatggcagaataaaacgggtccgtgatagcgacgttagcaacagcatccgggaagcctagcgactcgcgcatcagcgatagatcatgacaaccctgcatgccgaggtagcgacagaaagcgactctgtccggtgtaaggtcttctttcaacccgaagacatcttccaacagcgcgtggaactgctctgggttattattgcgcttcattgccggcgtgatatctttcgaggccggcgcgacgatgttgttcatcggaccggcgatgtgtcgacatcgcgcgtagtacacgcggcctaaggaggcgagttccttcttgaagacatccgtgaagcagggggcgtagcggcgcgcgcatccgatgaatacctttgggccgtctgtttcgttggtgccgtcaagggatcgggaggccttgccttttttgattgcttcgcggatgcggcgcaggcttgagacgctcattgagagagggacttcaaccattacgtgtttgccggcttcgagggctgtcacggtgtattgctcgtggtattccattgggaggaggttgaggataacgtccacttctttatggcgcagaacatcttcgacgactgttgtgctgtaggtgatgtcgaagcgggattggcattggttcacgacttcagcgttggggtcgtatatggctgtgagggtgtagtgtgttttgagggaacagaggactgggaggtaggtggcttgcacggcgttcgtggcgcctaggatacctaggcggaggatgggggtggacatgttggcggaagggtaggaagctgcggatctgatgggtacatatggagggaagccgagagacgattgagttctttgtagttcgtctcagctaaatgactgagaaggagaatggtatctcaagtagttgagggattaagggagtttcgaatgtgaaagtgagcaaagctctaaaattagagtaagagcgatgcctcgttgatacgatctcggaacgatcaaacaaagaaaatacggcagtgcccctgtgagctgtgtaccatcggcttcaaggacaggacatccctggagcatgccaactttgtgacatcattgtcctgtgatctagggccacatttcatagtttggtctgagttttaccccggattcgaaccatggctggtaaaatccgatacacttcatacagacagccgcagattatctgtcgatcctatatagatatggatggtccatgctatgtgtacgaccgatattggttggaaatgaaaggcatcatagatagtgacaaagaattatactcccgaagtagactcatcttagaataaccgacctttggctatcatacctctgtaggccttttgagcgatctttgcaagaatacacatgcaaggatgtcagaacaagaataagaattatccacccgacgtacggcagtggcagctctaaccgctagtgcgtcatattagattttgcctgcaggcggtcaaacttgactatagagcgctgcacttctgtggcgtctagtggtactagtaggggttagagactgctgtaacccgacggcttccaatattcttgaaagtggagaagtgttgcagtaaactgaatgaggatgaaccatgttgtatagcgtcacttatcaatctccgagtactccgtacggaaggccaggtcccggatggccgaatactcttccgttgccggccggtacttcaatttccgatccgttcaaactcataggaaaagattaaaaggcctagaaaagttttttatcccgttcaaagttcttggggcgcaaggacaggggaagaagggtgaattccctactagcaaatatattttatacgagtaattcttcattgctgtgaggatccgacttgcctgattccctatccgcacatttgagaacgcagccttgttagaattgtactcgttttcttgaatcgaactggcaagtcacagttgctacagacatgtctgactttgcagagagcccatcaaatctacccctggtagggaagtctgccatcgttactggggctacccgtgggatagggcaggaaattgcccgacagcttgccattctcggggcgaatgttgctttggtttacgtttcaagtaattccaaatcaacagcactcgaaatgatcgacgagtttacaaaccaaggtcggaaatgctgcgcaattcaagccgatctatcatcgggaacctgtggagaatcaattgtcagacaggctcttcaaggccttggggttgggaccatcgaactcttgatcaacaatgcggccattgctcaaacacccgccagcgttgaagaaccgttggatcaagatgaatttgagaggtaagcctttcctgttcacggccttcgtggggatctaaagattgctaataagactaggatcatgcacatcaacgtacgagctcctatccttttggtccaggcattgcttccgcacctaggaccgcatgggaatagaatcatcaacatgtaagtagtttcgacctaattaccttcacaccagcattgaccattaacattcgttgcagttcctcaattggttctaggctgaattttccaggatatggtgtttattcagcaagcaaggccgctttggagtctttgactcgtacatgggctcgagaacttgccgtcaagaatcatctcacttgtaatgccgttttggtaggacccacagcgacacctgacgctcccgacagtgatgcgagggccgctgccaagggtcttgctaccgccgagcggagactcggaacaccgagagatgttgcggatgtggtcgcctggctttcgggagaaggttctaggtgggtgaatggggatttgattggatctaacgggggggcttttatgtcatgattgaatggcccatagttatccgttgaatttacataactcacattacattcgagaacagcggcaatagtaaaaaatattaattaagctgtgttatagtaaacagtttagtgactctgcggagagaccacgactgaggttcaactgttactcggacatagcggggttggactaccgaccggggtaatacgaatctccgtcatctgcctcgcagaaatcgtgggatcggccctcgtaaagaggcgcaggggaaatggttgccgcctaaaatccgtaatatatatagggctgcgtatacatcaatttaatgacttcatgtgagatacttacggatacttcattcgcgagtaaaaacacgtgggaacaaagtatcccgaagtaccttgcgtataccctcactccaactgaagaggggccgctatccacatcaggcaacgtcaccgaaccttggaactctcctctcgtgatactccaaccctcggaaccttggaacttctgcctgtgccttactttatctcctccttgctccatctgattcatcatgggtgtaagtcttccagattcccattcttactagttaccacttcccgagaacccctcaatctgacccatctttagtttgctcagaaaattgccgcagctcagaataacgagaagatggccaatagtggttcatacggaggtgcgcctccagcaggctacactgggggccctcccgcagccttgcaaagtggcggatcggtaagtcatatgttgtgcctgtttctgctatgactcgcagttccgacgtcatcgaaaaaggaaagtgctaacgttcgcagagtcaacagccgcaataccaggcttattcaggatctccggctcctcagggatcggtacgtgctattttttcttaactctttttgctttttactttcccccacttccacgatttacccctccacggtcatcattcttctggaacaaccatgtcgggatcttaccaaggctatcctccatatggcggctcatctcaacgtcagaacaatccgtcatctccctattcccggcctccgccatccacaccctaccccgcagctcagcaatctcaacaaccgcaggcctatggccgcccgcctccacccccaccacaaggccagccctatgcctccgctagttcgccctacccaggtcagcaagcgggacagccatatgcttctccgagctcgccatacccaggacgacagtctgcacagtcgccctatcctggtcaacagcaacctccacaaggataccctggacaacaacaatatcccggacaacaacaatatcccggacaacaacaatatcctgtacaacaacaataccccggacaacaaccatatcctggacaacaaccatatcctggacagcagccgtcatatgtacaaaataccccttgccctgattcaccgcatatttctgttccgtttttgattacattggattctcgttgaacgctcaatggctggaaaagatgctaacgaaaaatagaaccaggcagcgccctattcttctcagggagctccataccccggtggccagggccgtcctggacccgcacctggaccaccaggcggaccaccaccaggccagtatggcgcacccggaggcggccctcaggctgcagctcccccggctacacagcagcaggctgcagcttaccgatcgcttttgatttcaacgattcaagagaggaatctccaaagcttctaccctccggagcgactggaccgacttgttcagtcgctcgccgccgaagcaccggctaagctcaataggctgattcaggaatgggccgtgcccatggaggtggcgaccgatgtcatgaagctctcgttgttcgacgtgattctctacgttgatgatagtggatctattgaatttgaagagaagggactccggaaggatcaactccgacagattcttggtattgtagctactgctgcatctaccttcgaccaggacggtatctccgtccgattcatgaactctagtgaggtgggcgatggcattcgcgatgcggaggatgtcagtcgtctagtgtcccgagtccgtttctccggcctgacccccctgggcaccagcttgaagtccaaggtcattgacccgatggtcgttcagcccgcccgggccaatcgtctcgagaagcctgtgctggtgatcaccatcaccgacggacagcctgctggcgagcctcacggcactgtgggtgatgtcattcgctatgcagtggaggagacgtcacggacccgttatggccctggcgccgtatccttccagttctcgcaagtgggaactgatcagcgggctcgcgactttttgggatctctggaccaggaccctcatattggccacctgatcgactgtacctccagtaagttccacatggggctcatgatggatccagctaatgtggtgttttagacttcgaggttgagcaggatgagatgtcgcgtgctaacccaccagtgcatctcactcgtgagctttgggtaagcgttatataacattgatcatcgcgtattagtaaactaactatgattacagtgtgccaaactgatgctcggcgctattgattcctcctacgacaccaaggatgaacgagacaacgaacgtcgcggtgcacctccacctgcatcgataagccagtacggaggcggaccatacggtcaacccccgccaccccagggccaagctcagccttcatatggtccgccccctggtgccccaccggcttcgtacggttcccagtccggctacccaccgcagggtggtcaataccaacagcagcctccccaacaggccccccagcagggcactcgtggtgcctatggccagcaaccgcagtatgggtcacagcctggacctggctaccagtatggcggacagccgccacgctattgatagagcatgacgtcatagggcttacgagtttcccgtttttcgccatgcggctttgagggaaggttgtggggtgatcacattttagtctacgtagcttcgaacgcgttgaacccaacttgtaacttgaatatcattgtttcgttttaaactggggatttctaggccttccaaggttacaggtctcttgtaatcgggcccgccaaggctacggagtacactaagacgaatcaacccacgggttcgctagttgaggaattgtgaaacctacatttgcagaaacactggggatacacataatacacaaaagggtcgtacatgacctagatatgtatattgttataacattttagcgaaaagagggggggaaagtcactttatactcccagtttttccgttttccatctgcaatagggttgcagggtcttgggaatgtcagggtggccaatagaaagccaggcagatctggatccagcgggccctcgtatgtcgccccaatgcagcgaggaacaatcccctttgattcgacgattcttaatttaacctggatggggctgtgcctgggtgcaggcggggatattgtatggttgcatcttacgcgttgcctaaaactctgccatgaacggggtttgttattgggacggtcttggatattgagacgtttgggttgttccacttgaactccaattttgtcgttatatgtctgcctatcatttatttccgtgtagatcgagtacgtcttccagatatagttggcgcactaggccgttttggggttaccatttctccaaacttggtcttggctactcctggcctctatctgggtttttagtcccttagtctcttggcctcttggcctcttttctttctcttctctacaggacattctacaggaaacaatcattgcgcccttcatttctatccttgcgtccgacgggagtactttcatttgctccacattcgcaacaccttcgttttacgacaaggagaacaaatcttccccgctaaaagaacagcgaaagaatgattgtctgatcagcgtgtgcaatcgaatacttcaatctacgcttgaggggaagttagtcgaggaaggatccaacaatattggtggaaaagaatcaccgagatcgtcgggttctgtcccgcgccctcgtgcctggaattcgtcatgtcgaacaaccaatttacggaagctacagagggtacccgacccgagcagaacaatgtcctccgacgcccatctcttgcgtcgtcacatacgatttccgactctgggcggcggatctcctcccaacatgtacgcttctcaaccgatctcgatcgcgagtcgatcgaggaacaacgacagacaaattgggaccgtcgtcccaattcccgcggcctgaccgtcgaaacagcgctggcgcctgcgtgtgttcgacctgctccctcacccacctctccgctctcacctaccaatgcgacccaaaatgcgactctctcccctattccctcgccaaatcctgagcccgcaggccggtctcggtcacgaaatcgtggttattcgctccggcgcagcatctttaataagacaatcaattcgacggagaaggacgatcttgccctagctgagctgggggaggccaaggaaccctcgtctgatgtgactcccacacaggcttcggctgcggagacgctcactaccgccgatgagaagcatgctctgagtgtcgcgccgacggcgacgcttgactcgatccatacagaggacgcttccccttatgtctcgtccgatcctttggagaagtctcccaaggagcagttccccgtgtctgtggcccatgagaagtggctccggaaaaaggcgactactgcagtggcagtcgcgcgtttccagactgttatggcatctatccagaaattcattctccgaaccaaggatatccctcctactcaggatgggcgccacattgacttgaatccgtctatggtggattctatgattgatgagcgcacccagaagccttatatcggtaacttcattcgttcgagtcgttacagtctctggagtttcttcccccgccaattattggcccaattcaccaaagtcgccaacttctacttcttgattatcgccatcttgcagatgatccctggcttgagtacaactggaacatacacgaccatcgtcccgcttttgatcttcgttggcatatcaatgggcaaggaggggttcgatgattggcgccggtatcgtttggacaaggaagagaataatcgggatgcttgggtgctccgcccaggccacggcacgacccaggacggagcctccatgttcagcaatactcaagattgggagcggatcaagtgtgaggaaattcgtgttggagatgttataaaacttgagcgcgaccagccgattcccgctgatattgctctcctccacgccaccggacccaacggtgtcgcttacatcgagaccatggctcttgacggcgagacaaacttgaaaaataagaagccttgccagcctgtgtctaaggtgtgctcaaccgtggaggatatcaacagcaactccttgcactttgtcgttgaggaccccaacttggatctatataagttcgacggtcatgtcactgtcaatggccaggagaaactgcccttgaccaacaacgagattgtttaccgcggcagcattcttcggaacactgaccgcgctttgggtatggtgatatatactggcgaggagtgcaagatccgcatgaacgccaacaagaacccgcgaatcaagaggcccgctctccaggataaggttaaccgtgtggtaatgctgatcgtggtgttggtcattattctagccgttgtttgtaccgtggcctacaagttctggtctcgcgacgtggagcaacattcttggtaccttcaaggtgctagtgtctcctacggcccgatcttcacttcgttcctgattatgttcaacactatgattcccatctccctgtacgtgagtatggaaatcgtcaaagttgcccagatgctgctcttgaacgatatcgacatgtacgatcctgaaaccgacaccccgcttgaagcgcgcacatctaccatcaacgaggagctcggtcaagtcagctacatcttctctgacaagactggtaccctgacaaataactcgatgcggttccgcaagatgagtgtggctggaaccgcgtggttgcatgacgcggacctccaggaggaggctgctcgtgcaggcgaccacaccaagttgatccacaaaaagcggagcgcaaaggggaaaaaggcaatgggacgcaagtccaatgtttccgaggctcagatgccccgtccgtcgaatgtttctggacaccttgatgctctccgtccgtatggccggtcggctactacgtaccgcaccgaagagatgctcgaatatatccaacgcaagccgtacaccatttttgcccgaaaggccaaactgtttattctgtccatggcactgtgtcacacttgcattcccgagcaagacataaacggaaacatcactttccaggctgcttccccggatgagttagctcttgttcttgcagcgcaggaactcggatatctcgtcgtggatcgtcaatcaaacacgttgaccgtccgcacacaaccgaacggaccagatgaagccactagcgacgaagtctacgagatcatggacgtgatcgagttttcaagcgcgcgaaagcgcatgtcagtcgtcgtgcgtatgcccgaccaacgcatttgcctattctgcaagggtgccgataccacactgatgcgtctcctgaagcaagccgatctggcacgtgataaggcgactgagatcgagcgccgtgcaagcagacgcaagaatgccgaggtgaaccaggtgatccgacgtaacagcgagcaccacagccgaaagaacagtggtgttcggaacagtatgaaccggcctagcttcagccgtcgccgctcgtcgatcactggccaacagggctcggctcttcgagctagtatcgatatttggctgcgtgaccgggagacggatgggggtatgcggaacagagaggctgatagtgagtactacagccctcggccatcggcgcagatgggcagaccgtccgctgcgatctcggactctggaagctctacgaatggtgaagaagacgaggatctcgtggaagaggcattggttgtcaacgaagcggctgttttcgagcgctgcttccagcatttgaatgactttgccactgacggcctgcggactttgttgtatggccaccgattcttggatgaagcgacctacacggattggaagactgcttacaatgaggctagcactagcctcgttgatcggcagcagaaaattgaagacgccggcgagcagattgagcagcagctggagcttactggggccactgctattgaggataagctgcaaaagggcgtgccagaggctattgacaaattgcgacgagccaatatcaagatgtggatgttgaccggtgataagcgggagactgctatcaatgtcggccattcgtgtcgtcttgtcaaggagtactcgacactgacaattttggatcaagaaaatggcgacgttgaggagacaatcgcgcatcttattggggagattacccatggccgcgtggcgcattctgtagttgtggttgatggccagacgctatcgttgatcgaagcaaatgaggtggtgcgtgagcagttcttccaactggctgtcaaggcagactcggtcatttgttgccgagcgagcccgaagcaaaaggcgttcttggtgagatcaatccgcaaacagctcaccgacgcaataacgcttgctattggagatggcgccaacgatatcgccatgatccaggaggcccatgtgggtatcggcatcactggaaaggagggattgcaggcagcacgtatttcagactactcgatcgcgcagttccgcttccttctcaagctgcttctggtgcacggccggtggaactatctgcgtgcttgcaagtatacactcggcacgttctggaaggaaatgctgttttacctgactcaagcgctgtaccagcgttggaacggctacactggcaccagtttgtatgagccgtggagtctgagtatgttcaacacgctgttcacctcgctcgctgtcatcttcttgggtatcttcaccaaagacctctcagcagcaacactactggccgtgccagagctctacaccaagggtcaaaggcacggaggcttcaatatccggctctatctgggctgggcattcatggcgacgtgcgaagcagtgataatcttctttactatgtggagtcttttcggcctggcaaaaatcaaccccagcgacaacgacattttctccatgggcctactcaccttctccgcgtgcatcatcgtgatcaacgtgaaactccaggctctggaagtccacaacaaaacctacatgtcgctaattgtaataataatttccgtcggcggctggttcatgtgggacctaatcctcgaccgtgaatacacaatgtcctccggcaaaggcatctacttcctcccgtccaacttcatccatcactccggccacaacctgctcttctggaccgtcctcctcctcgccgtctcagcagtcctcctctttgaattcacagtctcaaccctccgcgccctcttcttcccaacagacgtcgacatctttcaagaatacgaacaagacctcgacatccgcaagcgcttcgaagaagcagctgcctcggagctccagcagggctgggaccacggtaccaagagatcaagcttcgagatcgcccgcgacaacgccgagaaggttgaaatggacgcccgcgaacgccaggtccgcgagctgctcgcgcgccctcgtgtcatggataccaaggatgtcgagatcgatattgccagcgccacggttagtcataatagcagcgtgccgagtcgtgatactgaaaaccgtggtcgccaatctggcctctattccgaagacactaataggcctcggcgttctgttgagatccaggagctctttagtaagggctatggttctgtgcgcaagggtcaactcaaatgattcaagattcaagattcaagattcgtatatgtatgatgttctctcctttcttttttttcccccctgctgttatatgttcttttcgtcccgtgtctttctctcatagcgattgcatctgcgattctcctgtccatttacttatcatacgattccctcgggcatcgaagggcgttggtttggttttggttcctgtccacacttcatggtctctcctttttgttcgctgttcggtctgttgcatagtcggccgtcagttataagataccccgactcacatcgttggcagtctggctttttttgtgcgtgtgattcccctttttgctaccggttgaggtgcagtatatatttttcacctcgcaaaattatttttaattaaaagattcagcagaccttttcttgctagtttgccacgaaggtgaagaattaatggagaagcaatgcggttttctagacactaaagtctagagtccagtttacatttaagggcagcttaattaatctaaacactgtatatcctcagtccactactcgtcggtatctgcctccaatgctcctcttagatcttcaagatgtctgagcatgtgcaaactagttcaaataaagacgcttgagaataagcgagcgaatgcttccatcaccggctgatgcgttggtctcaaacgaatctgaaacttggcaggcatttgtcgacaacttttccaaaaccatgtaccacttcggagcttgccttcgagtgcgaacacgacgagcacttgcggttctcgattgtgggataatagcggcggtgttaaaggcaaagaaggtagtgggctcgaagtactccgaattctaggactagaagtagctacgacttttaagcccgaaaaagaaatgccttaagaaccaagaaaacaaagaaaaaacgccaaccactcttgaacttgtgaggccttgaaactgcgatttcatctcttccagataccacgtctaaccccggccgcgctggccacgcgcacgctgcaccgtagccttaccacgcgccaaaccgacaccgcgcccgcgctggcctcgtgtacggaacatgggtgcattcctagaagagagtagacagtcagcaaaggtgaaactggagatgcgcagttccgcaaaatcgtaaattgcgatctaaaagctggatatccgagttcgacgtaccggagcatgtcaggcacgatgaagaatcgcacgtggctgccgcgaatgtagacctggtcgagatgggagacacggccatcgcgagcggtgacggtgatgtccttgagctgaacgttcatgttgtcctcggctgtaggaaagagcagtcagtatgtgaccgcgcaaaagaaacattccccgatgcttgtttgacctctagatagagagtagacaccaagctcgagaagaaatgaaccacgtaccttccaaaagcttcccccggtagacgactcctgatgtgatttcaattgtcacgacatggccctattggaaaacgatattagcccctctgcctcgcgcgagatcgtgcatgaattccattttcgcgcgatatgtacatggatcgtataacaatctagatagcaatatcggggaatataacgcacctgcgcttcgttgaggagcttgatcgggatgccgatcgtggaggtgagcttgcccattttgactgtgtgacggcgaacaaggatgaaaaacggttgaaataagtcgaacagaaacaccggaagcttccttcgtaccaacaagggacgaataaaggcaatgggtgatcgtggggagatggtgggacagtaacgaggtcggttaagtggaggttaagagaaaggcgagttttgcggttaagctcatcctctccgctttggctgttccaaccccgaccaaacaacaacctcaacctcaaaaaggcaccaaagaatcacccgtgatgtgcctccaataacgctctctacaccccccggacctctacatcaaaaatccgaaacccaccataatggccggctcacccaattccaacctacgcggcttcaaccacgccgtctacaccctcctcaaacaaccaactcaattcctcccacatctcacaatcccaaccttcacccagctccccgagaacctaggaccacacctgatcaacgcaaagaaagggccccaaacacaaatacccacaatccgcgccctagtcctggacaaagacaacacgctctgcgcggcgaaaacaacaaccttccccccacagatcctagccaagctctcctcactccgcacctcgccaacatccctcttcaaccaaaccacacacccagactcaatcctcattgtctcgaaccgcgccgggagtcacccgcgcttcgacggcgaagtctccgagctggaagcgcagcttgcgcctctgcgcattcctgttttccggctgccggcgggcgcggaaaagaagcccttttgcggcgaggaggttgtgcggtggtttcgggagaggggggttattgattctccgcatgagatcgctgttgttggggatcggcttgggactgatgtgcttatggcggggatgatggggtcgtggagtgtttggtgtaaggagggtgcgtttgatgttgggatggaggggaagccggagcggaatgttttggagaagatggaggtttggattgaatggttccttagggtgaagggagggtatgaggcgcctttgccgatagggtgggagaagcagaagcagtcgtaaggcgtgtactgcgtggtggatgagacctttgatacccttgtataaactgtaccagtatgtttaccagtgtccagtatagtcggactgaactacggctacaatctacatagagctgtatgcaaaatgaatttattcagagcctagcgtcaatcccccaaactcgtataccgccagctcagcgctgtcctacttgtatggtcccgggcagaagatatcacaactctgcgcagcccagaggatcggcgttggttggatgtctgacccaaacaggtgccgacacaacaagctcatgtgcaaaaactcgactccagacccatgatgggaaacgggccattgaaagtgcagggcagacagaagtctagcaccagccttgaaattcacacaaaagagaataaaagaaatggaggggaatggagtcgcaatccaagccggtctgtttggcataaccacgtaaaagagaaatgtaaaaggggaaaatggagaaaatcaaagaatagtgaaaatcccggtcataagtcagaagaacatgaagaatggtaaattgaccgggagcaaagaagagaaaaaaaagtcctgtgggaaacaggaacaaaaagagcaaaaaatcgcttcaggaccggccccagaatagaaagggtataatcaatacaacaagacacaagggtatgtcacgcaagaaacacatcaaagggtaaaatcgcttccctagccatcgccagcgagacgagaatcatccgaaaagagccgtcgagtgggtgtttcaaaacaccgaaactcgacttgctgatatcggacaattaagaaacttcccaaggtgaaaaaaaccccaaagaacccatcgacaagcataagcgccgcatgcacagaaaaggccgtgaaacatcaagagacaaaggagaaacacaaattcaaaaaaaacccctgagaggcaccacactcgtggttatgacccagttggcataccctgcgagtttatctcatccaggttagccataccgtgggagtaatcacccatgccgggagaagggtgagcagagaggccgtgcataggtagttcgaagctggggctttcgtgcgaaacgtcatagttcacatgatgcttcgagtacatatcgttcatcgagagaccgtcgtcgaagctagtctgctggtcgtgcgagaaaccgtacatatcggacgagccgtgcgacatgctggatagtggcggcgagtggtttgcaatcagtgggtcggcagggctcatgctggagtaaggagacggtgcgtgagagcccattgccgaggcatccgttgaaccccccgagacgaagggcacgttgaactgaggcgccatgctggcgattggtgtggactcgtcctgaccggcgttgctgtacatgggactggcgaagtcgggaggcgaaccggtggtcgtcgcggacatggggttgtggaaatctagcccatatccttgggtatcgatgcggaggtcggtggggagatgatgcactgactgtggaacgggtgcgtagatgcctgcttcggtgtggttgaatgggggtggaggtggcacatggaaggaagacatgggactctggaatgtcgagatgtcaactgcaacaggtaccgaacggcttcgttggcgcttgtggccacgagcagctggcatgttgaagcccaagtggttgctgtcctggtacaggttcatgtaagttggagcagcaaaatggttgggctgagatgcaggacgctggataaatggcggggacatcgcagctggcacggcgaagctgctgttattataagctaggcggttctggaaggactccaacgatacaagcttggcaagctgaacgctcaagaccttgggatggcctcccaggtgatgaaccatgatctgactagcttgctgctcctcggtgaaatcaccgcattggtagaatcccccggagttagacgagtccatgtaaaagtgcggcgggcggttcaactccacaacaagaccacctggtcgaggtggttccccattcggcccagggctgggatcaccagtttccaaggtgatgtttttgatataggcgaacggatactcgatcttatagccggcagcatcgttgttgatatagtaagtcatgcatgccttatcaggggaatagaaaacgaccaagtccatggcgttttgtccaatgcgccgccagctgccgacagtcaaggaacgacaggtgaagtgagaaattactagattaccaattaattaatgggcgatggagcggagggagttatcaacataccgactttgccagaagggctggtctcgtttgcgtacatgctaggctggccgtatgcgccaacccgtccaaatgggtctcttgcgccagctttgttcggatcaaactgcatcgcgagataatgtcgcatagattccgggatagagtcacatccttcgccggtctcgatgctctttttggccagcatcttgattttagcgcggctaccctgagtcagtaaagataatagaaatacaatcccgagtagcacctaccgattttggaaccagatttgcacagaccgctcggtcatattaatatctgaagcaatacgttccctggtagccgcagtaggtgttgggttcttgttgaattcaatctctagaaggacaagctgatcctgtgttgcgcgttgacgcttgttgtttttctgttgttgagtcagagtgctcttgcgaggaggtcggcgcgtaaccgacgaatgggccgttgtagcactcgaggttgacggagagggcgtagaggctggaggcgaggaagacgagggcgcaattgcgccgtttgatgggtaatgcatttctgtcaacaaagacataatgtagcgtgagtcggtagagaaatatatcgcacgaaaatcgggactgtgtccaagctgttcaatatgtttttttgggtgcgtatattgtttattttcggaaagaaaaaaagtaggtgtgacgatccggccgacaaataatgaggtgggtgtacggtacggagacggaggattggaaatattgattccctcgaagcagccacaggcgcgagagggtcaggttgaagatataaatgaatggaagtgtagcgtagggatccaatcgcgagggtgtccacgtcagtgactggggggttgggttgtaagggcgcgtcgcagaggcgtccggaaaagaggggataaataaaaaggctggccaaagcagctggaaacgaatggcaggggaataagatctccctatatcgacaggaatcaatgaagaatcaaagatgtttctgcagatgctcaaatacccaggttgaatcgatcaacggggcgggaacgggagggggggcaaaccgtcgaggaaacgaatgaattgggcagaaatgagtgaggtataatgtcgccgtgaaagaatgaaacggacgcaaaagaaaaagaaaagaatggagggaatgagaatacaagaagcgcagggcagaagaagcggatcaggagatgggagatgctgactacacagagggaaccggttgatggccaacgcaccggagcctttctggactattggcacctcgtgggggccccattgtttttttttttttttttttttttttttgggccnnnnnnnnnnnnnnnnnnnnnnnnnnnnnnnnnnnnnnnnnnnnnnnnnnnnnnnnnnnnnnnnnnnnnnnnnnnnnnnnnnnnnnnnnnnnnnnnnnnnnnnnnnnnntttggactattggcccctcgtgggggccccattgtttttttttttttttttttttctggttagggcctcgatttctgtctttttttagttctcttacgttttttccctcttttgatgtattctacgagattgcagattgcagaaaatcctggaggggtttccatccgggtcgagtgcatgaagtggtatgtatggagtggagggaaaactggttttggcccctgcgttgacctgcatgagtctaaagcagcacggcgacctggagcaataagagcgcagcgtgagcacccattgtttggaagaggggtagtgccactccttactcgtcgtcttgtccaacggtgtgactctcaggggcagttcaacctggaaatggaatgaatacaaacacactgcaataccgacaatccacgtgagatcgggaatctgagacagtgtcaagtcaatgcgttcggcaaagcgtttgacgaatgaacgagggcggacggagttggaaggacgatgtgatagttttcccctggcaagtttcccctgattcgagcaccacggtgccaggggctaagccagtggactcggccaataagcttgcagttacacgtgcagttccgcggaccgccaaaggagaaacattcaggtacccgccccggcattgattatgattggccggtgggacatgacaggtcattctagaccccgaccccgaccggtactgaattcagggtgcaactctccttcgttgccctaagtcgtacatccgccatatccggttttacgatactgatcccgtcatatgataactatagttacaacttctgtacattattctatacggatatacggagtactccgtcttcaatagccctggatcgtctcaactctccggtgcgtctgtttcttacattgtagtattttacttcgggcattctgaccctgtactgcatgtagtattcgcattcccgtgaatatgatatgtagtgcattatcatccttgacgtgcaaaatcccgggcattccaatctaggcaaataagcaaatacccctgggacagttcattgttttaactccgcgaaccggttcatccataattaccgggaaaagagaaagccccctaaaatacccaatatccaatattccaaaaatattaacttcgttagaagatgaagaaacaagcccctcgatcaagcgcttgcacatagctatccacaattgacaattcaatcccccttggccaaccggagtcattacccaactcacgcagtctatccgtagtttcccagatctgctcaataagctccattgccgagttccgctgctgttctcgatagtaagccgtcatagactcatgcttctgccgaacccacatccgatcctcaggggatacagcctccctcgcggcaatgtagaacggctggggcaacgacgaatcaggcccacaccccgtcgacagatgatccatcaacccaaagcatacatgtaccaaatgctgcacgcgcggcgagcacgtctgatctcgaaaaacccgacgcgcaagcagcaaatgcgctgtccagtaaaagcactcggtgaggatatccaggggcgtacgctcacaccgcgccggggggattccccggtatccgcatccccaagcgcgaagctcgttgtcgagttggaaggcttcgtggagaacgcctttgtcggggtgtgtttcgagcccgtcgctcacgtcgcaggctagatgcgctattcgaactaggaagcacatcaggggctgtgggcatccagtcatcttgtggaatgagggctcggtggtgtcccagcgactctggtcgggctggtagagtatgaatctttgcggggcgtagggtcttcgctgtcgggagatggctagcattacatcgaccatgccgaagcgctgtactgtcatgcgtgcgatgggattctggggtatttcgtcgaagtagcctagtgcttgcataagccaggatgcgcatttcacgtggggctccagtacgccgtctgctgtttgtgcaacgactatcccctgaagaacgacggctgtgagcagcgcttctcgctcgtgcttattgctggctacaattgcacttgagtcgcaggcggccctggcatcgatactgagcaaattctttccaagcgttctgagcattcgttgctggcgcttggctgcgagatcaatgctggttaatccgaagttgagcatatgttctgtcgatatgcagacaatcgtctcgagaagaattggtgaggatagagctgggatagagacctgccggtaggggttgtccgggccatctacagcgggcacattggatgaaacgaggcttacgtctgtgcagatagtcttgattaggaattcctattccacttacacagaatgaggccacgtacaatattcccaggcagatttgtcttctgcagattcaaaccatgtctctgtaaaaagtgccgagggtcgacctagcatgttttgttcaattgctcgacggtctttgcagcgaggcttatgtcttgtggacattggctcttttggtcgaacccatttcacacccaatggatacttgcagtccaagtcccgcgaagcacaaaacgcgcaaactggctgttgctcgtcacatttattgtgcttttttcggcattgtagacatcctgtcgcacattgatattagcgcctctactagccctaggatgagtcaccataccagtccgtgaccgggaaaacttttcgcttccagccatctatatgatcgaagaaatgatgcgctactgagtaacgagagattgacaaagaataagagtaggggtgttaactatgtgttccccgcagccttatctatgtgagagtcacctgataatcgaccaattagattgttttcacacgcaaaatgtatttcacaatgacattactttgtatatcatgaccggaaagcgtcaatgagggggatagtagtcgctgtagcgaattttttggaatttctaggaagacatcgcggcattgatttaccatacggcagcggaacccgccaaacatgcatatcgactcttcattctcattgattgggaatcgagtgggaaattcaacaaatttgattgtaagaagatacgatagagactaaactgcagagggcgccctatcccagaacctctcgaataacccgaacagttcggtcgactatcaagtcaatctcctcacgggtagtattataaggcggtgccaggataatatgatcaccattagtaccatcgataccaccatttcccggcatcaatgaaattgcatactcgggcttgaggcctgtcgcatgtagagtccgagaaagcgcctttgaaggcggatatggctctttcgtctctttatcctgaacaaattccatctataatcatgttaataaataccaacaatgagaacgaagaaaacttacagcccagaacaaacccctgcctcgaatatcaccaacatgagggtgactatccagacgctcgtgaagaagctgacccagatactctcccatcgctcgcacgttcggcagcaggttatcctcctgtataatctgctgcaccttgtatgcagccgcacaggcaacggggtgtccctggtatgtctgactgtggacaaaagcaccggtgcccttactcagagtatccacgacgtgcttgttgacgagtaatccggcaattggggcatagccggcaccgagtcctttggcaattgtctggaggtcagggatgacgtcttcttgctcccaggcatggagggttccggtgcgacccatgccggacattacttcgtctagaatgaagagtgctccatgtcgctcgcagacggctttgagtgctttgaggtatccaggcaacgggggaacacagccaagggtctattgaaacagttagcatggttatcttggcgagatcaggttgtactcacagcaccgggcattgtctcggctatgaatgcacagacagtgttggggccaagtctttggaattcgtcctccagttcctgggctagtcttgcgacgtagtcttcggtgctttcgttcgcattcattctgcggtaggggtagcattgattcacgtggtggatattcttcgaaagaagactctcatagatcctccgccgggaggcgtggtatccaacagcaagtgacccgagggtatttccgtggtaggacgactttcgagaaatgatgttaacccgctggggctcaggaacgggcaactccgtaaaatactgaatggccatcttcacagcagcctcgacagcttcggtgcctattgtgattttagtaaccaatcttggtttagcatggacagatttcttacccgagctcacaatgtaggcacgagacatctcgcctccagttgagtctaccaggaattttgccagactctccgcagcattgttggtgaaaaacatggaatagcagtaggggactttctttaactggtccaggatggcttcgtggacacgctcgtcgctgtgacccagacaggatacagccgcaccacatgttgcatccagaatttcgagaccatcctcagttatcaggtagctgcctcgaccaccgacaatgttcaagggctcatttcgtagctggtggtaaaggactccgctggatggtttgatgccagtggtgtcgacctgcttctcggacggggtaggcactgaagctgcttccagttctggctgatagtcacccattgtatggattgtgctgaagagttggagctaaaaaaaaggatgaatcaagtgatgctcactgaagatggatgtgtccgtttgaacagggagggcggggtgccatatatagactcaccccgccatggccagaaattaaaatgcagacgtaggacactgacgcttgaaaatagcccagacgcaacgccgtgattggcaagtctcgccttgtcgcacatcgtcaagttcatacttgggtacgataagctaatcccaaagaggaaatctttgtcggacccacgttcgtcgactgcaaagatctgataggttggataatccagaagatagagcttaatgataacgaagaacgaaactattgggatcgtgtttggatttcaggcaggtctcgtactctaccggctacacatatcactttcgagtccgagaaccgaccgcggcccaaacagacatcattgagcaatcagatacgaaagacgcaggttaccttgggagccatacacgcggactatatccgactcaccgtaggatgatacgcaatagagaccttatttgcgaaaccagcccgatcacaggcccagctacttactactagatagtaaattccccatcattaccaatattcaccgcaccttggctagagccgctctacataagtgcatgcagcccatgcgtacagcggttacatattgaaccgagcgagttgccttcaccggtgatctttaaatcattgctggccaacagatgccataaagcttggcacgacgcggctgtgccgttgaagaatcacgaggtcagtccttcacggatatatatttgccaaggggtgactcatagcttcatctcgtaagcgtaagataatagttatcttcagaccaagtcatttgtgcaactttacccatcgcgtaaaaccgagaaaatctttcaagcatatatttccaacccacaatggcatcatcctccatcttccccttccacgtgggcgaggcttcaaatgaacgcgtaaagctcattcccttcaacccagaccaacactgcgaaaccttcttccgcatatcatcgccccatcccgagatatacacacacttaccactactacccccggcttcagcaatcgaactcaaatccctcttctacagtaattccacgagccatattctgtctttctccaatccagagtcattcgcctttgccataatagacaagacgcagccgccgtccccagaagactctgaaggtgaactggctggcactgtgagctttattcgcacatcgccgacgaacctgtgcacagagattggattcattgtcgtcctgcctccgtaccagggaacccatgtggcaactaatgctgttggactcgctctacagcctgcatttgactccgcggagaacggaggccttggattgcgcagagtacattggtcggctagcacgatgaaccttgctagtgctcgacttgcgcagaggatgggatttgagaagatcgggatcatcccttggcatatgcggtttgtaaaagggaagctatatgggaaagttggaaatggcagggagttgccgcctggaagcgatcctgaggatctgtggagagacacgttgagtcttactctgggatgggatcggtgggaaaatggcgccagacaaagggtggtgacggctatggagagatgagcagatgaccctgccgactacatggagaatggtcgagttcgaggattggatgtcagtcatttaggtgatttcggccattcgagagtgggaaatcttttcaggaaagaacagataggaaaagtatcccaccactcaataaatccaaatggaccctctggttcaatcagaattgacgatttgctctgtctatctgggtatcatattttctattaatgatatatagtaatgtgagggtgaataatttgaagtattgactccgtatataccaatgagatgcgaacggctagctgagcctttagctgcttcgccgaccatacggttcaaatggcaaagctccggcaataatcgccatcacaaggtaaagggctgcgcatatgtaaatcggcacgggcgtgctggtctgttactaatataagcattttcccaggagagcaaagagtaaagccgtacatttgcggcctggccgataacggcactgacgattcccatgatacgattgagtccaatggcaacgccatttcctgtgccccgatgggcggaggggaagacctatcgagtaattagatatggacagagttaatcaaagtgagcaagcacatgcctcgggggtgtaggcatagagagtaccgtagtacacattcaagcaaaaagaaatagcacacgtaaagcctagattctggctcgcagtgcgcacctgtgtatagcagaaaaagaaaaccattgtgatcacagctccgataatcatggttccccgacggccccaaaaccagggcgagcgacacatgagtcccgccaacacgggaccgaagatactacaggtattgttaatagcgtagtttcgccaggtgatatacgggctactctctccaaacattgcgccccgcgatgcaaggtaggtggggaggaacacgttataaagaggatacgcgaggccgatgaggagccaggagagccaaaccagggtcgtagacagagccattttgcgagtttcaaagaggccgcggagatggaagaaaatttcgctcggtgaaatgagccgcgcaaaccaagcagatcctggaaccccacgacgagcggtttgtccgcatgcctggagccgctcaatagtgaggctgcatgggcggttgtgtcgatcggcgatgttgcgtagaacgtgcagtgcttgctcgtccttgccctcggaaatgaggaacttgggggtctcttcaaggcggatgatggtcacacgaaggatggagagaacgaataccaaggcgccagatgtgtaccacacataacgccatccctggttgttttctcgagtacacgtggaagcgtcgctacaggaaaagttgggaagaaaggcccaagcaaacagacctgcgatgagctgacccagacctacatgttgtgagtcagttcggactatccataggaggtatactggagtgtaagctcaccccaccatgccgccatgagtgtcaatagccactgttccttgctaggaaggtactcgagaaagaccgtggtatcgagaaccaggttacccccagcaccgaacgcactcaagcagacaaacaatcccagtgtgacccaagagggagctgcccccgcgacgatagtgaacacggatgagataaatagggagaagttgaaggcaaaacgccggccgatgatgtctgccgaaaagccccaaaatatggcacccaccaacataccaacataaaccgcaatggtgagcccggtggaatatgatgggttgaactccaacctggcctgggtcgaaataatggattgaatcaagagaattagcgagtcaactgcatatccgaatccgttcaggcaaaatagtttccagtggtggggtgtgaaaccaatctcatcaatggtctgtatatagaggacaaagggccacgggttaatttcatgtctcattggtggtgcgaggatattgagttcccacatcattgataagcgtcatcttcgcagcaagaacctcgtccacctcttctccttgtaagatatcttggtctccattttgaatcgatctttcctccagaaacgagttcaccagatgtttgtccttgcccgctgtacctgtagggacaattgaaccggggaagtcttgagcatccattggcagcgaagggtaatgtttctgtgatttcctccaagctttcaacagaagagaaggctgtcgcagctagtcaagagagaatgaatgaaggaagacgagaaagttccccacgaggggcggggattcctgcaagcgggacagctgtcggcaagcaataatccggctaatagatattgcttcattagcttggctattgttcgtacgaaggtcgatcacccgatggttgaggtggccatgaagctgaacgctgtcagcgataaccacatggcgaccttgatgatttaaagtcatctgtaagaccatttgggcacctgcaagggacctttgatcttgacatttcagattctagctcttccaaaggcaatataagagcgttgcaaagccgcaagacttggcgcacgaggctgaacccgcaatcgtgactcgcagagaagggctggaggggaaacgacgctattcccgattcggacagattttggcgatgccttcactagacgacttcctacagaccaatcgggaacgatgatgcatccaaggcagtcagtctcagacatcccgagcttctctaataaatgaagttccacggcacagctttgcatcagccgcaagcatttccccattcgccgcggtacccaccaaaaacccatgggtgaagaaattgacgatgaatagactcggccagttcgtgtgaaaaggttgaagtggagaatatggaaagccacgatgtcaactactagtaaatgaacaagaaacatgaaggacaggtagggcagctctgtttgtgtcgggctgcgcaaggcgaaaagcgtgtgggatccaagcgtcagctaccaacgatttcctaattgggtaacatatgccgggattttactccgacctgcgtacgcctcaaggatctagcacagtataagcactggtgactacggagtaccgggtggaatatcgactcctgcgggatccactaagaatgaccaaactaagtgaccatgaagcatgaaagggtagagggatatttgggtatttagtctatcgcacaagatcactcaacattcagattgattcaaaaaatcaagaaatactcctcataacatccgctatatgtgaactgccagaaagacatgtgaatgtataatgaatgaaagtttagtacgctggaggtggcatcgtctccgtcatgacactgtgaccatattcctgctccagctccgacgaagcggcagcaagagtggcctctgaaggaaggttgacaattgtcaggtacaaaatgttctgcaaaaggccatggtcagtcaaaaacaacaccaccaagtcagcagggaggagaaaacatgagttagacttacgctcttgatggatcttttaccagcttccagcgccattctcttcttgcggaactgctccagacgaggctcgtagtccttctccaaccgcctcaactcccgatctgtctcggattggctacgtcggtcgttcaagatacgctccctccggtcgttgtactcgtcaaggactctcctctcctcgtcatcaattctgccgcccttcttctgcgcacgctgctccggagtaggactcaacacgccgccggaaagcacaccgatgagtcctccgttgacggccggatgattggggtcaaggtaccggttgctgaagccacgaccagccggcccgctcagtacatcgttgccgttctcggcggtgtactttgcgcgagcgcgacggtcgaggtagtcgttgaagttgtcaaatgccttcttggccttgtccttggtcgaagtcttgcctccggcgggaacgacgccactcttggagcctggtgactcaggcggagaatcagacaggtactcattgtgttggcggtggttatccatatagacaagcggtgcgacagccataggcagaccgccaggtccctgcgactcgccggaaacataattacgcatccatgcactgccgccgccattgctcgagccgttggcagccagtgaggcaagctgcttgagacggctaggattcttgggctccttgagctcaggctcatgtttcataatcatgcaaaacagaccgtgaggtgcgaaaagctcgcggttgtacttgtccatgacgttgttggtcctaagcggggcgctgatcagcatcgtggcttgagaggagagtccttttgttgcacttactttcctctgacgtagcccttgttggccgcccaggcgcccgcttgcactgccgcagcgacgcccatgacgataacctcgggagtgaagctcacgccaagggagacgacttgcacgccggcgaggtacttgttgccctccaagcccgtgttagtctcatcgatgaagcgtaggaatgacctttggtcgatgccgcacaactccagagatggcgcataggcggccatgaagcctcgctcctgagatcctgggcgctgctgcggaaccacgatgggcagaggcagtggtcctcctatggtggccatcccggcttgtgagtcgtacctggggtctggggtgggttgccctccaaaaatgggattgggaccgggctgaagctgtccgtaaggtatttttccattttgagactggccatactgaggttgaccatattgtggttggccatactgtggctgtccgtaaggttgtcctgttggggaagatccgtaccgaggacgtccaggttgagggtggccgtactgagcttgattaggcgggtaactagatttgtcgtattgtgattgtgagtgcatgcggtcctgcccatgcatgggcagcttctcggactgcgcgtacataatgttggagaatcgcgacacaccagtcagtactcggttgatgaccaagagagggaaaatcagatgtaagaaataagacaaaaaagaaatgaccccttcgaatcgtggttccaagatggacaagatgccggagcgtccactggaagtgcatctgatagtgccgtgaaccgaacatcctgcatacctctttgggatatggtcgtgggtggcctcccctctatcctgtttaagttagcagggtgcatgtggctctccgtttgaaactgtgcctatgtaccttttttgtctttatccttttaccagcgtcattgtggcagcccggagaattactcctaattgaggcaactcttggtccttgtcgacctccaacgacatggagcccccaaagggccggctttctatgcccgatgcggcaaacggggattcatcacgccagtggtgtttggcattggctgactgacgcccactagcgagcggcatattactctatctgcaactgaatactctaagtgggatgtgtcgtaccaagtgccgacagaacaaggcgtgtcatttatgaacaacgaaatgtatatgagctacgtgttggaagcttcagaaacccggagagaagacaagacattcaatcaatcaatcaatcaactcacacccatcaaaccgccaaacctcgattctatcttcaccactcttgcctaaccatataccgcaaaaccactcacacgtcgacacaatggctgctccctcttccaagaccgtccaggaccttaacggctcttggactgctgtaagagacgaaagatctctcacgtctgtgtcacacgagtcctgtttgttaaccatacctacagaataacaacctgtccgaggagtcctctgccgagatcctcaagctccagggcgtcagctggctgacccgcaaggtcattgccatggccaacgtcactctcatcatcgaccagcgcaaggacgagagcggcaacatcctgctcgacattgagaacaagcctagcggcggcctccctggcacccaggagaaacgtgtcctcaactggaagcccgtcgagctcaaccacggtctcttcggcaacatccgcggtcgctcccgcatctgcaagctcgccgacctcgacgatgactacctccgccagggttgggaagacggcaccgaggaggtcatgcacttcaagaccgagcacctcgactccaagggcgtcgtcacccagcaggccatcggcttcattgtcttcgacgacactcgctaccacgccaggcgggtcctggtcaccaaggacgatggcgagaggcttgagaccaagctcgtctacgactaccagtgttagatatagaaacccggtgtatacatcaaaggacacagtaaactagctttgaggcgatctacatggatcttttcatttgtcttgacgataccgttgctacataaatttatgaaggtatttttgcctacatgagtcccttgctaaattcactttggaatactttggcatacttcggaatacatgtctctgtgcgttttctgtctgtcaaaagtagcgcgcgtgtttcagtgatgataagttgctagacaagagacagctcagaatagcataatgtgcaggtaacatagacatatggtctcgaactggcttgtgaagtacctgcggttcggcgatgggggcagaggaatccacgaggcaaggctgcgttaggcttgtcaacttctctagccgcaccattgcctggctgctggctctgacatttacctcgtgggaccgacgagacagggcaaaggcgagcgaatagggttgtgtgttaacatgtgtggggcttacggctgtctgtatgtacgattaagcatcgtgggtagatccgaaccgcgcctctgccaaggagcgatgggtcttggccaagtgtcgaaagaaacgccgcaaggatactagcatccctggcgatattgagcatacacgtacatacgtacgtagcgtaaataggtaggtatgcttcaaaccagttagtcacaggggagaattgtacagtctagcggccaaatccgacgggatttttggggcttagccactgtggtgtatttaggcacagcgtttttcgccttcaaatcgtcaattcgtcttgctttctctttccagtccttgtttaccgtatcgttgtccgaatctggcattcacctcagccttacctagtgtctccacgcggaacgggacagtcccgtactaagtgcgttggggttgatgccacatttccccgcctatccatcgacaatcatcatcaccacttggtagaatcgccatcatggtctactgcggtcgtccttcaacaagttgcagcaattgtcgcgccaagaagagaagagtaagtcattactgtttgccccccttgataaaagacagaaaatcatcagggaaaaaaaagtaaaaaagacattttggctcacatttagcctcaaaaaaagtgcgacaaagcagtcccagaatgcggccaatgttgccgcacgggtcagaaatgccccgggtacagagatcccttaagcctcgtctttcgcgatgagagcacccaggtcatcaaccgcgcccgatcaaaagtctccaagaggacttcgacgggcaccccaaccgaccgcctctcggtggagcgcacagacccatcacaggcacagaaccaacaacaaaacacctccacaccggactatcacgtcagccgcccctccgatgtggtcgacgagaccatgctggagatgagcgacttcgatgtcggagccgggatgttcgccggcggcagcttcatgcccgagttgatgagcttcaacgaccctttcaacctggacgagactggactcttctccctccaccaggatgcttcgcccagcgccatgccggtatcgggcgacggtcctggatccgctgcttctgtttctgcctccgcgtctgggcgtcgttcccgtgtgggcgcttctagtgtaggcggcgacgatgtggctctcaatcagttccctgatgacagcagcaaccgcggcgaccgccaacggctaggacacaacaatttcaccagcagtcagcccgaggtcatagcgcgtcccttctccgtgcctctcgtcatcaccggtctcaatttcttcctctctcgctatgtcgttcggcagtccggtccctcctccggcttcttcgactacgctccggccatgctggcgcaagacgacggcggcaaggacatgctcgagggtgccattctggctgtcggcttcagtgggctcgctcgcaccactagccaggccgacctgttaaccaggtctatgatgatgtacacccgcaccatggagcgtgtcaatctcgccctcgccgacccacaggccgcctgtcgcgacagcaccatcgtctctgtccttgtcctcgccctctacgagttcagcagggcctctatcgacggctggaagcaccacattgagggtgccacctcgctactcaacctgcgcggccgctcccagttctccacctcgaccggcctgcagatcttcaaggatgtcttctcccagctcctcaccaactgcctgcgcgccggttcccccattccctcgagcctacgcatgctgcgcatcgaggccggcaacgccatcagcgtctcggatccctactgggtcgcctgcagcggcatagtcgagcttctggatctcttccagcacatttccccgggcggctactcgttctttcctaactctgacggcgccccctccgctcccgccgccccttccaattcctccaactccccctctactgcctctggttcttcccccgcctctacctccatgctctccggtcctctcgagggtgccaacatctccatcgagcacctcgagcgctacctctcacaggtgctcgagattgactaccgcctcgagagtgccttctccaagtgcccttgcgagtggcagttcaccgacaaatccaactcgtccagcagcaactacgatccgactggcatccggcgcgatgccaaccacatctaccacgatgtctggattgcctccatctggaacggcatgcgcatctgccgcatcctcgccaaccacgctatcagccacctcctcctccgcggcgctaacatcgacagcaactggttctttgccaacaactacaccgaccgcctgcaccaggccacccagaccatcgtccgcctgcgtgacgagatgctcgcctccgtgccccagctcatgggctacgccacttccccggcacaggagctgcagcagcacacgcactccaagaacaacgccggctcggccgtcggcggctactatgcctgctgggttctccttactgtgggctgcatgcacaacctcagccacgagacccgtgcgtggactgctgcccagttgcgcagaatcagctgccaagcaggtcttgcgcaggcagatgatttcgccaaccttgttcaatcaagcaacctccgtccaccattgagttgatagtatggaagcatcattcaaatctagatatttcatacagcgatgaactggcctggcgacgacggagaccggtcaaactatgacctctttgtgaggcctttgatggccgatctcaaggcatacggtgctctcaaagggcttgtttgggacatttggaatgaaccagacaatgagaacttttgggttcgctcccagcagcagttgatcgacttatatattcggacacgcaaaatcttttggtaagtggttcttttttaagaaatctgggcgagttgctaatacgcagatattgaagatgccggctttgatcaagttcaactctctgggcctacgcttgcttatagccccgtgtctggcaataccttgtgggccaactggcttccccatattgcaggcaatgacactattccagagcagtacgcatatcacttagaaggagggacgggtgattgggacaatgatattcaaaacacaaacgtactttgacagcgctactgaagagcgagggccttcctgggcgtcaaatcagcatcaatgagtacgccaacatggctgaataggtccagctgggcagcctggtggatttttcgactggagcgctacgatgcatttggactgcgtggcagcggttggattcttttcttatagagcatacaccgaacatatagggttacacaagtatatatcctttcacaaatcaaaagttaaaccgagttaatcaccatgtccgggtggttaagctcgtctagggagtcgacgtcgatggcggtggacctgcgccttgccagaggtgagagagtccttggacgtatgaaaagggaggatacggacgggagttgtggggttgggaaatattacccaaaatggacagcttggagtccggcaaatggtgacagaaacggaatagcggtggcggtgcaagagaggctcacgcacagcccaaaagatgacagtggacccttaccgccaaggagatctctggggcaggtctccacatcttgaatctattcctaatggggtatgctcgatgttcgttattccacatggagatgcccgaaaccctcaagttgtcattgaatgcctcgttcttctctgtgtttaagtgcacagcccgaacgcattgcaagcttttcatcgtacacctactccaccatgggaggccgctctcttattttatcccctggacattttatttattaccctcgtagctggtgttcaaatgactcttaactttcgccctatccttcatacttgtttcatcagatcataccgattgtccagggtcttcaattcctgccctgaccttataatctagattgccctcaatcagctatcagcaagacacctacccactatattcgccgctccggcccctctcgatccaagatgacgtttggctatcaagatggtatcgcgttgttgcagctcatcgccttcgtgccctgtctcttcctcgccattcttttgtgttaccagcaaggaatgaaggccgtagcatcatgttggagattcctcattatcctcgcctgtctccgaatcgccggcgctgtatgccagctcatcaccatcactgacgactcgatcgatgttgtcaccacaaaaatcacatgcgacttgttgggcatcgctcccctaacactggctgccgtgggtctgctacaaagagtgtaagtcgcaacctgatatccacctaccagcgactcgagactaacgtaggcatgtcttgttcagaaacgcctcgatcaacaagctctccagatggatctttatcttcgtcagcatcgtcagcttggtcgggctggcccttggtattgccggcgctatcaaggccctcgatagctacaccatcccccccatgctccaggccgcattgggcatgttcgtcggctgcttgggtctcctgctgaccattctggggtacttgaccatctaccgcaacgtgatgcctcgcaacgagaagatcatcctgtactcagtctacgcctgtgcgccactgctcatcgtgcgcaccgtctacggctgcttaggtgactacacgaatatcgcgcggttcaacctgtttgagcccaaccctaccgtcaatctctgcatgggcgtcctcgaggagattatccttatgattatctgcctcgctgttggcttttactgccccccgcccaaggaacctcaaactggtaagccttgtcgttatttaacgtgattgattgttttcgtgacgaatatacgctgacaattcttagatgctgctgatacgacgaattcggatgagaccaacattgtggagaaacgctcctctccccccagcgatacccactccaacaccattgatgctttgaataaggagaaaatggctgaggaggggcgtatagggacctcgactgccgaggttttataagatctggctatccctttataccttacaaagcatctataaccttacactgtctcgggaggcctttcgttataataatacactttgggattagcccctgctgtaaatccaaaaatctaacgaatctctttttcattggtatctctttagcgttaagcacccgtctatttgatataagcctcaagaactagaatagaatactagaaattgctaaatactaaatacccttctaggaacgtttctaccactagggagaaggcctttagcagtagtttctcatcgattcatacattatggtcgagaaataaagactcgattagaactgaaggaatcagacagtcctccgtacagagtcctattcgcgtaaacgctctatcctcgatacagtacgtattattagcagtagtaactcccgtatcacaaggaagcgtatcattcttccaatcacattcattaggagtgctcgggacggacagtgagaggatatagtagagaataattatttttgatggggtatgacgggcagaactacccgcaagcggtaggaagtaataagccaataaaacaacaaaacagcccgaaggcggtctaaacaccataatgttcaacaaactacccatgagggatgggaccaacctgagaggtcaggggatcccgacctgatctctccgtgcagaacgaacattaccattctaaggtattctgatataatatgtcttgaaacatggtagttgtgccttttcggaactaatgtcttgaaaaaagattcatatttgagcgcaccgcgcaaccattcctaggtttccacgaagcgtgctcaaaagagtagggatcgattgggcgatttcatctcttgatgtcaagcaacaataagaatgttctaggtagtgcaatcaaggtgatggttctgtccctctccctcggaagagagccttgttcgcgtaaacatgaatgcacctagcctgtggatcctatgccttctgagtagtccatgagatctcataatggagtcgagttcgaggatgctcaagagcttattatttagctactgaggtagacgctagaatctagtgataggctggaatcactatgctggcggtcgtgtcatctggatcaatcgccgggccccgcgttgaggattggcctgatcgcatagttgttttaggacatacaactaagatgacctttctgaattggatattcttttgttgccaagttctgccaagttgaaaaaagtaaaagcatcgtcctttaacagtttcatacattattctagtctatgttgtggtagcacgtaaaatactaaggaattgcgtcttagcacgtaaccttgacaaagcacatctctgtcagcaaaacaattcaagtcttctcttggcttcagagataggctgcgcgctagcaaggatcgtgcatcctttcctatgcaagcttgcaggatttaaagcagattgcgtgagtattgcgcaacattacatcgaataatcgccatgtctgtactcaaaagaccccccagagaaacctaccggacgtaaacaggcctagtgtcgggtttcatagctatctctggcctcaattgccggacatcaggtggatgctcttacgatctctcagtgacgcgattatcaggtacgttgaggacatatttttctagttttataaaatcagtagaatcgccgggattgatctagactaaaagacctggttcatttatcaatctatgcactagattttccagcgccacacaacccccaaagcataatggggaccgcgggtgattctcgacaagccacggccacctcgatctacagcatagatgcggaaaatcagaccagcaacacccagacagatgatgttggaaagcctgtcagatcatggaaaagttatgtgtgggatacgtgggaacttccgcccgatcaacgctggatgctttttaaagtagacgctttcgtcctcacgttcgcgtctatcggatattttttgaagaatatcgaccaatcaaatgtcaacaatgcctttcttagcggcatggaagaggatcttcagatgtttggcaatcaattagtaactagtatgtgtcttcgttctcacctgagacgtttttaccccttcttttcgacgagatcgagaaggtttccggcatttgctaactacgactgtttacaggcacatctatctggactgtgggatacgttgttggccaaattccgtccaacttgttgttaactagaatctcgcctcgatgggtcatcccctcgctagaggtaggatggggactcgcgactatttgtacatcaagtgtcaaatcgtataaagcgttgtatgctttgcgcttcctcgtcggattctttgagtatgtcgatattccgagattctatgcactctctatggccacttactgacgccgttatagatctggattttaccccggcatacattacttactgggatcatggtacacaccacgcgaaattggaaagcgagccatggtcttctggctcgctggttcagtcggcactttgttcagcggtttcctccaagcagctgcttatacaaacttgaatgggacacatggttacgccggatgtatgtgaccgcaattatccttgttttttctctcccggttcttgaattcgctcataccgcttcatctaaaaccaaacgaaagcaagaaactaactgctgacggatgagaatagggcgctggcttttcattattgatggtatcattacgctaccgcttgctctcgctgggtacatattcttccctaaccttccgcaaagcggtaaaaagacatggtggacgacagaagaggagcatcttctgtcaatcaagagaatgcagaatattggacgtgccggcaagcagccttggactaaggcaaaggcgaaaggaattctgctgagctggcatacttatcttctccgtgagtcgtacttcatacctttcttatccttgaacaatactgacaatgtcccacagcattgctatacattctctggaacaatggaattccccaacctgctatgggatactggctgaaaagttttaatgcccatcctgctcctctccccggaacaacttacactgtcgcacagatcaataactgtgagttcgagttcgactccgagttctaaattccaatgaacctagctaatttcatatacaagtgcccctccccacgaccggtgtactcatcgtcatggcattgatttggggttggctgtccgatgggccgtgtcgtggcgctcgctggccatttatctatatcggcgccgttactactgtaagtcaaagagattttatatctgtcaattgggtttttattcagtggccagcaactaaaaccattcacagctcattttcgcctccctgatgatgaagatgcccttttacacaaacctcaaaggccgcatggttatttattggctgagtaatattggtgtaagtctacaattctgtgaaaccttcaatcgttaccctaacaatgcctttagggtggtgccggtcctttaatcctgagctggatcaacgagatctgctccgatgacacagaaaagcgagcgttgcttgttgccatggctaatgaccttgcctatgttgtacaggctgtcgtgagtctcctcgtccttttcactgattcaagctagatactaatgagcgtgaacgaaggctcccaatttcgtgtggaaaaccacagcatttcctcgtgctcccaaaggatatacttggtcgatcgtactgcaaatattgctcagtaagaagcccttgctccgtctgattcttgtttcccactaatgataatcccagtcttggtcaccgcaactattcaactgcttctgtggcgcgataagaaaaaggcaggaaaggcagaagcaggtctttcagccattgacaccctcgaatcatcatctatagagggagatatatcggtgggatctagagaggacaacggcaaagtggctagcacttctcgggtcaaacatgttggcttggattgattcaaaaatgtaactaaatatctggtgtgtcactaatccccttttaagtctggaaatgagtcaaaatataattcggatgtgacatagtgaatagaacgtaagatgcataagcatacatacatacatacatgattgcggagcgaagcgaagaaatattaaatgacaaggtctaaggtgtatgtcgtgaccaagttgtctattatgggccgttttgatgtccatcaggtgacctgggtaaatgcactagcttcaatacggctagctcatggtttatggaccaatcaaaatgaattcatactatactcataggtaatgatcattcagtcgttgagcatagagagcagatggctctgtccaagcatccacctttctctatcattatggcttccaaaatgttggggttgtcaagtgccgatcacatgccaatgcctggtttgtcaggcttcacctagctatttaagctagatctcgatcattgtagagaaccgaactttcttcatctctctctctctctcgttccaagacaaaacatgtactagatgcgttcactcgcgtcctttggagctattcgctcgtgcactagcaatcgagagaccgaccagtgtcaatcttgtcgagatgccaaaaagagagagcgttctagacgccgtgcggctatcgagctggggagaggaaaacaaaaataacgtatggaggagagttgtttacgtgtggcctacggcacccctctttccccgcactctctaattactacatagcctctcacttcacaatgactatctggaggcataagaccgacatccctagtaagctattccatttatatccacggagagatggttattgactattaatagtgcaactttcttctttttgtctttcataccttacaacacctcacaaacaactaaaattcactaccagccacaagatccttttctgatttcttcattttcctttgtatcatcagtccctctcgttttgccgtttcaagtcgcagctacttctcgtcctgaaatttcttcttcgggagcgttatcatctggccgtacttcgtgccgaatgctttcctttgccttcaacaccgccatcccacaatcgagaaacacaagtgcccgtcatgctcatactcgaaggtaaagctccgaaagtggtccatgagtttgagaaagttatcgacaaaatgcctgccaagtttcagatcaagataactgatacatttgagagcaaggcatcggccggcgtgtttgtccgaatgacctgggaggtatacgcccgcttactgtcaaccgtggatatgaagccgttacttccagttgttgggccctcgcgtattagggcccagcttctcttagaggggacttatcctagctttggttacctcgtttccctagcagacgatcaatgaaggtgcgcagaataacttgcagtatatcctattgctttccaacaggaacggagaccaacgatgaacggtaatacagacttgattgttgatagtacctatattgtaggagcattcaaatccatgggatgaatacctccatataactaatccgaagtgagcatagtaaccttggaagcataccgacggcatagtgtagtggatccaataagcttaatccgataagctaaatccgatgaactccgaaactccgaatttcccccgctttctccgagccgcctaaactccgatcttcgtcatacccgccacagttccccttgtcggtttcatctctttacaatgcctactccgtaccggacttctaactccgttatatgaggtaaattctgcaatacaatgagtcaaagcccctcaaaccgcaacgggccggggctagcgcaaagtcctgcgtctcatcgccgaaagcgaaaagtccttagttgcgagcattgccgatgctccaaattaaagtgtgatcgtaaacaaccttgtggtgcttgcacgcggcgaggatgcgagctgtcatgctcgttcttggttccccccagtgttgcaactacatccattcacattcatccaacaaagtccaatccctcgttgtcaaatgtgccatccaggaacacctccgccaccccctttgcctcattgaggcaacctgctactagttgcttggatgataggtctgagcggtcaggtcctgacgaaattcaagattcccacgatagtcgctgggaagcggttctccaacggccctttccggaacatgatcctgtcgcagcaactgatactttgtctcccttttcaattggttcgagtatctcgcttcaagatatcattgaaattttgccctctagaacgagctgcgactgtctggtttctcatttcttcaatcacatctctgctctgttccccattctccatggcccaacattccagaagcagtatgttgcattcatgcaacagccctatgaagtggatctctcttggctggctttacttttttctatgtgctctttgacattgaacactatggagccaagtgatcctagactggtcgatttatggccggcgggatctcattccaaggagcaagaggctgtgactttgtcccgccagcttcagcaaactgcgatggtttgtcttttacaagatcaatttttcatccgccataagctcagcacattcgaggctttgctgatggtgatatataatctttctcacaatgagtctgttgatcaagggtgggccctgttgggtatggccttaaatatcggcatagccctacggtgcaacgtcgactctcagggacttaaccatctcgagactgagagacgccgacgctgctgggttggtatattgactttacatacctaccaagccatcctatttcgggatatcgacatgacattccttcttgatataaaaaccacaatgcccgcagacgtgaatgatgctgatatcaccaaagagggaatttcgcggccttccagttctcccacccagatgtctgtgatgatgttcaaagctcgacttttccggatctccactcagatctgtcaccatatatctggtccttcacgacttgagatagagccattgaataaatttgatgctacaatcgccgaggaacaacagagatgggactccacatatctggcggatggtgccccgaacatattggattccagttacgcctattggtgcattctacaaacatatgcacatcaactttatcttcttctacatcgccccttccgccattctcagtcatcatacttccttgcaacatccagagagaggtgtatagcttccagtgctgccttactaggaatccatcgccagatctacgaagttccactgcttcgaccttatctctggttgcttagaggagtcacgagtttaaaggcacttcacgctgccgtggcgctcaattcgtgtcttctggatatgccatcgtcttttgattcaagctcgtaccgggaggagttaaacttacttgtgcttcgaatggagagcctttctcgtcgaagtgctatttgcttgaaggcgcatcgcatacttcttcaattacagtaggttatgctctacgtgatggcaagcaggtttaactaacgaaattttctaggactcaattcggcgcagaaaatccgcaactaccaaattcggggactcggatcgagagcacaattgaagactggactgatatgcgggaatggtttggaccggatctttttaactgggtaagacatggaacctgtgattgtttgactctatactaacttacccagaatttagataatgttggcaatcttcctgcagtttgatttctcctttacattggatggtatctccggtgattccaatgtgtatcaaatgtgttcgccacgctgactagttgttaaaagtgaaattagattcaagttcaaatactcttcagtgggtagagacgccatcaaatagcaatgtgcaaccaattgcaaagtacaaagtgcatgaataactgtttcttgacatttctttgttgcataccaccgactggtgatggaacgatgatattgatgtttgattgacctcaagatatcagatatgacgtatcggtcttcacttcaaagtaattgtgctttctcggatatcatattcaattgtctaaatcttcagttgtactgttagacaaatacgaacgagaactccttgaggagctaaatcaatatagcagactcaaaaatcgaagtctatatattgagattcaggtgagggaggagcaagtatcagccgtataaaacgaccaaaagcttaatcagactgatccagaagctgtgggtcattctttcgatcgcagaaatccccctggcttacaaaatggaagtccgatactattcggccgaaaagtgactaggactgaccggagttcaagtgcatcggagaaaaatgtggcaatggttcctacctatgtccgatgcgccgacgatcaaatccggatttggctgataaatactaggggccaaatgaaatgaattcatcaacagagcctatgattcacggcccaatgactgccttcacttaaatccggtagcttttactctatggggctcactgatagttaaaatttcggtggctttctcttcttagcccactttcttcttcatattcactgccggtcttcagttgttttcctacaatggaatcactctttcaatatcgacgtatcagacaatctgttcgcgaccaactagcggaaatcaaagaaaagtgcacctgcgagaactatacacccgggtcaccacacagctcgaggtaagtgatagctcggcgaagctttgcaaatctatctgtcaacctatgctcatactccattatccagctgtcagtcatgcaacgttgggttttcttttccgccgaaccaatcctcgcttcaagcaaaacctcctaccgattccatcatcattgtggactgggatagtcacgatgatcctttgaaccctgcaagccagagcgtgtcgcagaagctggttatgacccttctggtctcgttacttgctttttctgtaactgccacatctgcgattgatgcttccggcgtcccacaatacagtgaatacttcaacgtatccgaagtagtcgggtctcttgcaacaggtaagtacagacctttgaaatgattatcccttttgcacaagttgaccgttccaacagccttatttctggtcggtttcggggccggctctctcctgtcaggcccattctctgagacatttggccggaatgccgtctacctgataacaatgctcctttttctgatttttatcatggctgcggcactcgctccaaatctccagggccacctgatctttcgttttcttgccggcttctttggctctactccactcagctgtgctggtggcacggtggcggatttgtggaatccagtacaaaagacgtacgcttttccagcctatgctattccatcatttgtgggacctatggctggtcagatcataggcagttatattcctactactttgggatggcgttggcttgagtggattatgcttatcatgggaggtgcgattcttcttattgttattgtgttccagccagaaacatacgggcctcttcttctgtactggaaagcaaagattctccgcgaagaaactggggacgagagatacaaagctccgatggagatgaaaaaccaggctttgggcccgcgactgttggcctcggtataccggccatttgcgttggtttactctgagttgattatcatcctgatgtcgctgtatcttactgttgtctatattgtccttttcacctttttggagggatatacatacgtttttagtcatccgtatgggctttcacagcagatgactagtatactctgggtggggatgctatgtggtattcttctcactagcttcctggttccggtggtttactcctggactgccaaagagtacaagagaacttctactattgctcctgaagagcgactgtggtatgcaatgctgggtggtgcaccagcggtgccaataagtttgttctggatgggttggacctgctatgtaagtgcccttgatttgttcatcattgtcacagtcactgacttttgcgatttctccgtttagccgtccatatcgatttggtctcctctcatttcctccgtcttattcgggtacggaatcacgactattttcctttccacatacatgtatatcatagattcctatggtgtatactcagcatctgcattggggttccttgtttttactagatatgtcgtcgcaggcggtatgacagttgctggtgggcctatttaccgttctatcggtgcgcattacacattgaccattttgggggccatcagtacagccatggccacaattccgtacttgctttatgtgtacgggccgagaattcgcaaatacagcaaatttgctgtcaacaccggtgcggaatgatgcttgaaactcggcaaatcccatgcgaagagctttgctgcaaaattttatgcgttcagcaaaagactgttaattagatactgaattagaatttagagctcctaatagaatcaatcaatcaatcaattaacctgttgcagtctaactagctgcgtatgactatgtaggcacttctctactgaagcaagaactcgaagccgaacgccgagccagtattatccctagagagtcatggcttaataaaacctataaaagcctcctgtagctaggaggaaaattccttctatctctgctatcctacttctttttccccctccttccctcccttcttactactattcccgctctcccctgccctagtagtagtagtagtagtattctagcctattaattggcttattcgttaacttttactaggtctcttatctcctagcctcgttccttattattagctaatatctattatcttctataccttattccctaaactcttagcctattagttcctcctcattatccttcttagtatctatttactagaactattaaaggagacctatttggtgtctaaagttagctctatagtaggtagcctataggtttattatcatctccaatagagactgttggtacaagaactgagacatcgatgtgctgattttgcgccactattcccaaaatctgatgaacgctttgtccccgagttctggcgggcggacccgcgcggcatctaaatatccgctgaccccactttccactaggccaaatccttcagtgtaacggataaagataaaggtccgtacaagagggaaacacatgtaagcctgcacaggctcgggaaggaacatctatgtcatcgcacatctgtttcgatgtcgatccgtgaggggttcatcacatgagcataggccgatagatttccttatagtttgagaccccccggtggcccctcgagactggcaagaattagtcttggcacactatcaatacattgtgttccctccacaaagccctttgtatcttacccggttgacaggccttacacctgcataacgtttatctttacattcagatcccagcattgttaacaatacctttcttttccaatcagatcagatggaggtacagtaccggaatctcttagcaagcatagactccggccagatactatatacttatcatagaatagaccgcattacctacagctgaagatgatcataacgtcagaattgttattggagccaccgaatactccgtggatgtaacaaaaatgccttattttgcatcatttttaaggtttcgacgatcttctggtcaagaggtggcccaattgccaacgcatgacgaaatacccttcttcgatataattaacgagggcgtgaagaacggattccgccaattctttcgccgcatgccaacacagatcaatgactatcgcattctctgtgaaactctcgaatttctctgcattgatatcctctcaggtcgcaatatgcgtgatatcattcacgatttcagaaggggcaagagtgattgggatccaagggagagaattgataccggaggattgagaagtttgacacgagactcggcttttcggcttctataccagtttctcctaggtaaattcgagtcggaaatcaaggacagcaacatggcatacaacgcaaccttgttcgtcgtctcccatcgaagaattttcaaatacaaaactcggaaaatggtccgagatgggtttgaggaacggtttcaagtatcagggaagcagctacaaggactcaataagtgggcaatcgacccatcttctcctggaggcatagaagaggaggatatgtctaccgagccagaggatacggttttcgattcggattggtcatgctgaagttacagtaggatactggaccaaagggtaaaatgagtgtaattctaaaaaggagtgttctccgatgtctatcttggtgtgtgtttacaacagcttaccctataaagattcacccacccacttttctagtgccgtatagatctgctaatatttccctaattagtcttagtccctagtattgagcttgtattttgtattatatagagtccctctaattcctctcttctatattgtataacccttgaatttgtcaatttataatatgccagatgaatgctaggcagttagtgatgcacggggaccctactatatattaaatttagggtcgagagcaccattgctcggatattaaactactttgaatctgtaaatataccgaattatataccatgctacttatgcgcccaggaaaacgaagtggaggtgggtgaatctttatagggtagactgttgtacaaaatcgcgacaagtggctgctgactactaatacaacactagaagtaaggaacgtacggaagtgcgtcatttctggtcgacacaaaacgatgcctcatcttatgtagacctttttgtatggatccgacggacctacaggtcaccttacaacaaacttctcttattactcttccagaatagaatactgaaggcagcatgaatgacctggaaacagcggtctagataatgcaagtaagctacatggataaatcagggcaatactatctcgtgtaccggaagggtacatatgcgagcagcacaggataagtctgcatgaagtgggtgtatacaacttcgacaaaaatatgaaataaaaagaggtaattaaaagaagaaatctcgagaaaatagatccgccgaccaaaagtgaggaattagaaggcgtcttagatgcacgttgaccttgaaagcacgttgattatataatctcccgtgatcaagtcaagctcaaaagcggcaagaggtgagtactaaaatggaaaggggaaggcagacctatccaccccgttatttttacgatgcgggggacagctagccgtctcaataacaccacattctcccactggaaactatcaatggactgaactaggcactacctcactcagattcgctaagagacatctcaatcccaatcgcacccgagacaaaccgccatcatgacctattcagcgcccccatccaaccccgcaacctccgcgaaatccaatgtgaagaatatctccaacccgcgccgcctcctaatcctgacaccaacatctcaatccctcacaataatccccccactcctacactccctaactggtgtgcccgtcctcgacccgccacaacagccagccccttcgccaaccctgaccccaaccccaccacagccagcctcaagctcaacaccctcaccaccaacaagcactttcgctggatacacaacccacagccctctccgcctcgaaacaaaatactacagaacagaagttcccgtatgggtcgacgagatcccactcgcgatccacgatacagatgcacaaactactcccacaccaacaccaacagccgagcaatggaaaaccgacttcttaagcacagaagctgagatcgtgcgcgaagctgtcggggctctagttgtgtgcgcgcatactcctagtgatgtgacacgtttaccaggctccaatgcaaacgcagaccccgccgagcggtccgacgtgcgcgcactgcgtgacctgatgcgtggtgttggcgctgtcaaggagctcattgatgaggagcgtggcgggctcggtgatgtgactggtgtgtttgtgttgattggggggaggaagggtgctgcgggtgtgggtgtgggtcagcagagatccaaggatgccgatgcggagctggggcttggcgttgatgatggggatttaggtggtggagaggcggcgccattttcggttgggtggtgggaagatcagctttttgatatgggattggtggggtgggaggttgttgagtgggatcctaaggagagtttggatgttgagacgaggaatcaatatggaggtgagttcactgaagcaacccacccattcgcggttgagcagtagtattggaggaaaaactttgcgcacctggaatatcggagcaggaatgatatgcctcacctgcgaatgggctgtatggcaagtttttggattttagctgacttatgctacttctagaacgagagggtatgcatcgtatcaaagaggtccttgagactcatgactggtctatggttgggggtgacgatggctttgacgaagataatgaccctgccatggattccgatgatgatcttcaagaccaactattaggtctgggtagctctcgtgggtttggtgatgaggttcatgaattagagcgcgaaatgttcggtttacgcatggcgatcgagcgtgggggtggtgatggtgatgagagagatgattctgacaatgatgatggcgaagatgagtttgatgttgagagcatggagacattgatgatgcgcatgcaggcaatcaagggtatgattctatgttgatttctcaggctcgctatagttgatattgcggtgtactgacttggcttagatatgagctccgagctgccggagagcgaacggaaacgatttgctgcgaaggccgtgaaagatattatgcgcgagctctgagattacttgttagtatacatagattctaatctgaatattgaatgatcatatttcattttagcatgttatgtagaccattcacattttccaccttcccacggcctatattctgttttgtgactaattcttcctaccatactagcgacaacaccaataactggggaaatatctaaaatgactttcaaaatgaccaaaaaaaaaaaaaaaaacatgacgatagatatagatcccgcactgccacaaactgagccacaccgccccaaatgtggagacctctatgcacttctgtgacgtcagaatattccaaggcacgaagccaacttgacaacgagctatgtaccgtgcatggatcaccctggttagcttattgcttgaatgaatcttggcctcactacatgatcttccccattctccacatgttgggtactcgaaagcgccgcgtcgtcatgtcttgagtctcctacacgacataccccttattcaattcctagtctacgacatattctctctcattacatgcgacctgaacatacacaataaccaattggacggacaaaacgatctcttgttttcaatatgcattttccggcacggagttgcgcccctatcctgtcggcgacgacggggaggatatcacaacgtggtgctcagtacgcctcgttggggaagattggctcggctgggatgaatgaatggtctggtaacggctcttctgttttttctagacatatccgttcattctcagggagttgtctcaccagggatattggtctcggggcttctggcgcatcaccggtaacgaagctgagatgtgctgggccggctgcagttccaggagattgccttgcctggattcagaccagaaaattccgcactgaaactcatagacaagcctcaggcgataagcagacgactgaagagctttgggagaaattccaagttaaagagggcaatcaacaagctcagcctcggcggacagttcttagggaggatggcggaaatggaaagtcactgatggaaggagagacctggcctgaaaggttgaccaaaggtaagaagggtggtattatgattgattcgagtgacaatgctgacttttggagataggcaaaatattgacgaccccttcgcggcttttcaaattgatcattcctttaaccaccgtcggcaacgacggccatgataaaggtatgtcggtcttcaacattatcccgtcacttggccatcatgctaacagtacaatcagaagtcgagcccatagctatcctaatccaccctcaacagccgctatcatacttagaaagcttgattcagtcagagctacctccaatcaaaggcaacaccgacaagctccgcccaccagccgtatccttcatcgcaatccagcacgacgacaacgctatcaaacccaaaaagcggattgagaacgagatcgacctagacgcaaaccaaaaaaaagaaataggcttcatccccggcaatgacggccttggcggtagcaaacccctgaacggccgatcatccacccagtaccgccggtcccgggaagaagacgtcgagacctacagctatccacgcaaaacaaacggcaaacctgagcgcttcgtgcgctggtcacaggccacagagattggcgacttcatccgggatgctgcgcacgcgggcgagttcatcgtgacgattgaagacgcgccgtccggcctaagtcagatccgcgtcacggtgccgtcgttcaacgagcgcacatattacctgcgcatgcggctgcgcaagctctcacggcgcattcaaaccatggcggatgtgaaggagaagtgtgatgcgctggcacatcggggtgcgcagcgggttgcgatgagcggatttggaattcttgccgtttggtggtttacggtctataggttgacattcgagactgatcttgggtgggatactatggagcctgttacttacttggtcagtttgtctacgttgatggggggttatttgtggtttttgtatcacaatcgggagatttcttacaagtctgccctggaatttaccatcagtgcgaggcagaagaaactttatttgttgcatcatgttgatttgcaactttgggagtcattggttgatgaggggaactcgcttcgtggggagattaagaatatcgcggctgagtatgatgctgagtgggatgagcgggctgatgagcagcaggatcagcgtgtaacggaagtcttgaagtcagaccgtcggcagaaacatgagaagaagaaaagcgaggatgataagaagagtgaggatgacgattgattattttgatctgttcattctccctaagtgtatgtattgcattccattccatttctggtcatccgatggtctccaagtttcatacttcaattatacaaaatagacattaaaccgcatgcatatgaagcgaaaaaccagaacaatttcttccagaaacactcaatcccaactatcacagcgttccattccgcacaggatcgtagtacttcttcggctcttcctgcctcgtacgtctgtctatatatcaacatccatcagcatcgccttcaccaatcaagcatccaaaaaggaaaagaaagatacacaatacataccagattccgaacccgcagatcccccaacctcccccttcctcctattccgattattcctcacatcacgcgaccgaaaaacactatacaacaaccagccagcaacccagttcgggccgtattcgccattcgtcgccccgcgctcgaataggccgcgcacgagcggcggcgcattgtgacagatctcgaggattgcccagcgctggcagtccgggcggatgtggtgccagaaaaaggggggacgggttgctgggtcggcgcgcacgttgtcaaggaggttggaggtgtcgaggttcatgcggttgtagacaatgattgcttcgtcctagataatattcgttagggggtacttgaaatgtatggtgtgtgtgggtgatatatgaccattggagagggaggagggaagaagtgctgaaggtccggctggtatacttactcgcatggcacggtagtattgctcatggtgcggatcttgcgggtttagacccaatgcgagcatgaattcttctttcgatactcgaggtccgacgggcattgtgattggattcctcggttgggtattgaatggggtgttggtatatagtagagccgagcttgatcgagatccaagaaagaaatcaaagatcaatgtgaatatgaactggagaagccaactcacagcccgcgccaaagccagactttatatatctgtccgcttccaattctaaaacagatcctaacggcgcggaaacccatctaacggccgttgactgcaaattgcacggcgccgaggccgccgtgccgatacaatcagagacgcctatgccggaatgaagcagagcgaacggacagcacgagacaagaaacagaaacagacgcaatcagaccaagcggggaaatgaggcaaagggcaaacccgcaatcagatcgatataacacaagcacaaggatccggagcagaggacagggatctatgggatatacttcgaggctaagccacctcttacctcgcaacaaataaagatgattattgtttcttttggcgtgcatgcatgaccgacaaagggaagcgtaaagatggagggtacgagtccagtgttgcagttgaggtattttcatttggctattctggggctttctggtctgtctcagcgcttacgattctctctccgggattagaccctagtgtacttcttgcatgatttgtggagtcgggtggtacatgtacaatgtacgtgtagatgatcactgcacagccgttgatatacaaccccgggctacgtcaaactgtgacccgggctgcagtgttcgcttttagtggtttagcgtgtgcagggtaagtaaaccgttgggggctggtggaatctagaagatatggtacggcgctgtgatacagtctttctccgggggaagtaggctgggggcatgaagttccgatgtggcaaacgagagcgtgcgtattttacagaagcgcgaaaaagaggaaagcaaaagagaaaaaggaggtagtatagattctcctattcctgttctctatctctcgctcgccccctcgaaaaggactcatctcaggccagggtgacgagtcgaataaagcgagacaatcgcaaacagagtcatcgtggacccagaacttggggtcgaggactgagcgcgaagatagcaggctaagtgcgttctggtatatcgagggcgacttgctgagctcaagtctgctatccgagacagacgggtagaaaatatatgtatgcttgcatgcatgagaaaggggtgtgttttcgaggtcagcttttacgttgtatattacccggagtacacagtcgcggatctagatcgagatctccgtccgacaagaggtacaacataggtatccggtagggaaagaaacttagtatccctgtattctaatatccctgccacgaacctgtacgcatccgccaagaagaaaatcgacacggctctagcttaacggaaccaagtctagaaagccacattccccactgaggtgtggagaaccgttcatcccaagctcgacatcgaggtccactggaacccaacccagcaacaagcgaaacattcaagccatccttgctagcggggaatagagccaaataaggcacctgtgcctacccgacggcttgcaggcatgctgcagaaaagaaactcgttggctatgtcgtgtaaccttccaggccggacactaggccaggatgcaattgagctgagatttgaccgaccggaacccaaatcggtgccgttgcttgcatctgtgtcagctttttgacttcaatggtgagcgcgtacttgcttcccgttgcggggaagggggatccgggtggaagagcttgactcgatttcaattttctcgtttgtgatgggtgcatatgcaatgggaggatagtcagttgaatgggacgagcaacgtggcaacaagtatggccgattgatggtcgaattttgaatgatcgtgtgcccttataacataatagggttgaaaatacccttgcggctgctatacgtgaaaggctattttagtaactaccaaatggtttgggcaaatagatatatcataaaaaggaaaacgacacgtaattcttgacaggagctcttaccgtcctatctccgggtcgattgaacttgtccccgttggcgctgcgattaaagaacggatgtcacattgtggacaagacaagggccagccaaggcggatcatttgcgcaccacgatttgaatgacactgcataatcccgctgctgcatttcatactagaatggattgttgagacagcaaggccaacaatatatgaggagtgtctgtatctgacgcactgaatcggaactcaagataggaagaggattctttaggggcacttcatagaactcaatggttatagctagccaaataggctagatctcagcctatgcaatatgtgagcgtgtcattgtcgctggcgtcgcaccatctccatactgcagattcccggtactcgttcatcattcactattgggcacacaaggccggatgcaagcgtaaatattgcaggacttgctgtcagttagagtagacagtggagggatatgttgttttgagcgcactaaactcgtaaagtgcagcattcaggaattagggctcgtaaagcacgcacacacagagatctagacgtaccctccaatgcaatgacagatctagctgatcaacacaaccgaccaaccaagcggcgatcaaataactatatatccagggttagatcgaccgtcccacataggcatagtataaagttccaaagttgagtcaagcttccaaggttccctagagcattcttggaagtggctgacggtcaaaaagcttttcggggcgccacttctcggctcggatgcttgaaagttatctaataatcagggcaagtgtcgggcagtacttaagcttactcaaacccaatattcgggtactcttgttgattactttagctacattctaaagtctagacatgttacaggctacttcttgcgttacatgtacccaatgcctactatacgatgacccacgaaacaaaaagcgcaggttaaaagcaagaaaacagggcctgatagaggcactcgggtttccgtatgtcgctattgttcaagacccctcggaatcgtcacgattctcgcgcctgcacctacgtgacagatcaggaacatccgtttgcacaccagcgtccggacgggaaagggagatatggtgggggatattgttatgtacgtgtcaagaaagccagagaagccaggatgggagagaagagaaagggagtgaaaaagggcaaagggggaaatgaaaatgaaaaagccagttgccatgctccatccgtcgctaaaaagaaaaaggggagggaaggatatcaaccagtccgcatgacagcttatttaagaagaggcttccttggtgggctcctcagtcttcttggtctcagtggctttggcctcctccttaggctcttcctcgggctcttctgccaccttcttcttctcctccttgacctcctcctcttccggcttctcttcttcgtcctttacctcctcgccgtagtatcggcggaggagtttctcgacctttcgatattcgaccttgacttcatccagagtatttttgatggccttgaggcaaacctccgtgtccggctcgtcaatgagacctgtctcgtccttgtgggcgccgaagttttggatcttctcgcagccgtccttcaccttgacaaggcccagtgtggcagatgagcccttaaggaagtgcccgagggcagagagttcatcgaggttcttgtcatctctgatgctggatgattagtaaaaggacaatctccaaaatttcactagctaggacatcactcacatttccttctgaattttcttgtaggtgttctcagcctggtcaaagaaaccgtacacaatgctcttgctgaagtcgcgatcctcctcgtcatcgtccatctcaaggatctgttcgaatgtgctctcgtcgagtatctccttataatcggagagcttgggagggccctgcttggcctagactcggatatcaggccgaggaacctttgaccacggggtaggaagtacttacctgctcggcctttttggtatcggctggtgccatggttgtgtatgtgtgtgtggaggggatgctttaaggagtaggtgagagcaacctcgtgtaatgcggtggtccggtggataataatgaggttgatgtatccggtctgatgtctagccaatccagatggaatactaggggctctatttgcaaatcccagtcagctcagattccaagtgatccaggtcttggatggatagaacgatgtggcaaatcgatgaacgtgaggtctcgaatgtaaagatcaatgatgatacaacaaggacgtcagaaccgtaagatctgcgcacaacgcatatgtcgtcttacaaagccagtagatgttacggattcaggaaccaatgtggtaagcgagctgttaatggggacaatggtgagcggctccggggtctatggccaaagagaagaggctggaaccgaagcgaaatacagccaccagattgagtgggtagtgagaggtgggaaaaaccaagacaacgggagttgagggggatagaggggtaatgcgataccacaacaagcaggggctggaggggggaaagaattaaaagaaccaggtgtggatgtggtatattggtagagggaataaccagggccattcagcgcatatactcgaacggtggtccagtcacagcctggtaagccagcactagcgcatcgcaagtgctgcagccccaaagccagtgtctccactagggaattgacagggaaaaaagaagatattcaaagagagaggggcaaagaaggaagtgcatcctacctatgatatttttttctcgcttctggagatgatcaagtgccgaaagtgcgacaatgggacacaataaaccgcagaaagaaaaggaaaaaggtcgaaaaggaattaaagacgcagagaaacagaaaggaggatgttgaagcaggcgagggggagggggaagagaggaaatcggaggggcggagagacagaaggtgggagaggaaggaggtgggtaggtcaactccaatccgaagggcccaattcaaggatattgggaatttagtgatttagagaggggaaatatatcagagaaaatcggcaaaaattactcaaaaataaataaattgtcagctactcatttcaaattcactagaatattgtatcgcgaatatatagataagtaatattggtattattttacattcctcgcatcgtcttggcgtggaacaaccccaaacccacgattgcactagaactagtatgttgtattattagttacggggtgctagctatacaatagtttctataaatgcgattttattcttcttctgtagctgtagccgaagtcatccaaaaaaaaaaaaaaaacaattctagacgtccgacatagactagtacattcttctactccgtatggagcagactttattgcttcttgcggctagacagcacattatcatcttagattttcagccacgatctctcgaggaactgttatctctggatcaaatttctccgagcttggttcgtgagcccagtggagtacaaccgtggcatcagctcttgaattgatgggtccactacggagtggaaagaaaatgctcggaatgaacgggacagcccctcgatgacctgctggaagtaggtttagtggagactgatagggtaaaaaaacacaccaaaaacacgacgcgttttctgaccgcaaaagacagctcctatatatctggcagcagtggccataggacgacatcatcgggccgccgatcccagcagggaacgtcatttgctctttccccatgcgaagtatggatggccacacgcggaaccatttagggaactgcaaatagccatagccttttcctttttgtccttggggttctttggaagaatatcggcagaacttttcatggctcggttagtacagcttgaaaagaaaaacaagaataaacttctagtgtctgagtctgagtagacttttagccgcgaagaaaaaaaaaaaaaaaatagggtaagacgtaataattcaggctcgtacagcagggaagcacgatcgacttgggcccaagtgtgcagatagaacttgatccagttggtctggaccctcgaggaccgtgtctaataactcggaacgcgctcgtttggattgtatgttgcatggatttctcatctgacgtactcggtgatagtgagctgaacgaccaatgtgtgagctcacggctccacggctcctttttccctctcagcggggaagaaaggggggtaatattgttgggctaagtcagatgcgaaggattatgctgtcaccgatgacgatgggagttttggtgttttcttccattcctcttttttggtctggcttcacggttcgaatgtcatatgaaaagactggaaaataggttagtgatatgtcaattgaaattggacatgtccacactcgcgaaccgcagccatctttgcttatatagaagaatgggggcatttgcgcatctcctttcccctggattttgcgcgaagtggttggctctccatcataacccaccaatgagaagatgcgacagtagccatgacatcataggatggggccgtagttcagcttcccagccgctgatgtcattttagcgtaacggcaaattacggcaatgacgtcagtcacctcataattacatcgaattactcacttacatacaacggactgtttactcatttactctctacttgtgtaccctaataattccattgtggtctgtcatgcacaaattctaaaggattatatactcataatccctcaacgcctgacagacctcaaaaggcttaagatttacaacatatgcaggataacatcatggcttcgcctacgatgtcagcccgcatacgcctatgaccaatgcatggtagaagtacggagtacggagtaatgagaaatgccaatttcgtcgatatgtgaatcagtttttggtagataatatcggagacaagtggactatgaattcaatgtacttctctctctcaggaactatcaaattagccgatctcatctcaaatcccagctttcaaatcaaacaccaatccctccaatatcccaccaaaaacaagtcgagtccaaaataggccagagtccagactatgcatgtttgctgcatacaagatagcgtcctattgcagtagtccggatcagctagtctctgtaaccctggcagccaagagcgcctctatgggaagccatccacttagctgccgacacatgcactcgattgtgagcgaatcacataaaaactattcttcggcagagagcttctgaagttgtttgcatagctatcatattcagggtgagaagaagagagactgcatggctgacttctcaaaagggcgattgcctagtagcatgtagcacccgactgaatatcagaattctagtgatactggtcttttttaatcgatattgcataaccatcccaataaaactcaacagacaacaaaataaagatgcgctataccccagatctcaaacgccttttctccacagcttcgtcgaggtcttccagaatgcttacgtaaggaaccgtgacctcggtccctttattttgttgatcgcgagcttcccaaccaaatcaacatttccagttcctccattctgggtaacatcatcaccaattgccctgcccccacgaccccaacgagaagcaattccggtcaaaaatggcatcagtcaaaacttcaagcgccccgcgctccggctcttcgggtctaacaaaagcctacctcttcacctacaacaccgtcaacctcctcgcctggggtagctgtgtcgtctacacggcatccctcctcccagccaatgtctcggccaaaactctcccgaaggtcttcggtcagactttctccccactactgctggccacccagtccctcgccctgttggaagtgctgcacagcgtggtaggcctcgtgcgcgcgccgttcatgacgactgccatgcaggtttctagtcggctgctactggtttggggaattatggcacagttcggtggggatatcgttggtgctgggcggaccacccagctgggtgattatgcgtatctcgggtgtgtctttgcttggggcatcacggaggttatccgttatgggttctttgctattaccttgtctgggaactcggtcccgagctggtggacttggttgcggtaagtcttcttttttcttctgtcgtgttccatgggctaatgagtttcgcatttgactaggtacaacaccttctacatcttctaccccattggtatctcaagcgagtgcgcgcttatattccaagcccttggacctgctggcgagctcagcccgcttttccgttatcttttgattgcgattctcgtgatctacgtgcctggtatgttcttcttacagggtccatagtattggttactgactacctaccaggatcttatgttctgtacacgcacatgattgcccaaagacgcaagatcatgcgcggcaagaagagagccgattagacagctcacccgcagcacataaatatgcttaaattgggtgggaaacgaaaagatgaattggatttatagctagcctgatgctcaaaagaaatgcaagggtctgtcgtatttaggacccatttagggtccggaggcctctaacagtgcggacatggttcttacctctggttcaatattgcaggagtcaacttgatctaagggtatagacatcatccttattgactaaaaattatcaatatgcctttttggctcaaggcttttccgcgttcctaaactgctaaaattgaaattgttacctagacgatgcgggcagagcggttggaaaacatgccttgtctaacttcttcagaactccgtcaacgtcaacgggcccgggatgtctatttgtgagctcaaagagatagccagatgctggtcttctcgggagtagcgagaaatggcattatcaaagtccccacggctgtaaaagcgctatatcaggagaggtttgaatgatggatagcgtaatggaaatgcgtcgctaggcaccgaggagggtaatgggcttcctaatgcgggtgctatgtatattgcctcctctagtaggcctgctgtaggagaaaaagagagcagtatatgggtcacaacgacgaccactctaagacttgataaggctagatcaggagatatcgcccgcacacgctatttgcgcttcgtgaatgatgattacatcagcatctacgagcgtgtgaggattgacacactagtggacctcgcctctgcttcaaacaaggatatcggcgtaatgtcttggtcgattgtagattgatcccccaaggtactccagattcaatctgctcatgaatcatgagtaacagggtccaaatcccacaagcggtagaagggcgagactccagcttactagacaaaggtaaatgtttttcagtatttagccacggctttcctacactttaagctttgggcctttgctcagatgatcttggaacaatgacgtcattatgggtctgatctgaagtcaatccccggatttccaactttccaacgttgcactctggattcaatgatggcttcacatcttaatgctaactctatttagacatggtcttcaattaattggagtgattattgttagtcaagtaaattttcaattacagagataatggggatatgaagacaagcaagagcaagcttgtattcacattgcgcgcaagactaaagatattgataatggtagtaaagtattcattggcataaaggtcatctgaaactattgtacaggtagagagttgtctttctaccacctgggtgctagcaaaaaaaggtatctcattatcccacagcagtccaattgcatgagcacccgtttagtgcttagcggcctctgtatatcattagtattgattccatgtcacaaccttgttttgttttcagtcttacccttgtggacatcagccttagtgttgtgcgaggcctcgtccttcttgtcgacaacggcatcctttgcggcggtggctcggctgcctaagctggcatcagagtccttggcgacatgcttgttggtctccttcgatgcctcagcaccaccgccctggacggtctcagcaacgtagttaacggcgttctgatatcagatattagcatttgaagacatgttatccaaagacagggtgaggcgaaccttggcggtctccataatgttgatattgaggttgtttgattgagtttggatgtttcaagtatttgttggtttgaagacttatgaaattgtatgatagaagaaggagatggtagaagcagaagaggcttcttatagtaaatggcaggtcggttggtagcagggctcaggttctgacgtcattgaacaagcaaccttggaagaaccgagcaacgagtaaccagctttgtgatgtaatgaaagggaggattacttgttcttacatgtacgatgatggaaaaaactctccacttaccaagctgttctatattgtacaataacagggtaattcgggtcggggtacattgtaggctgctttcttgaggttgtgggggaaatgacgcattaaaaacatgaactttgctattttgccatcaaaagcaagttctctacaatgtgacaagtatcacgttcactatgttgtaattagtcaatccccatgtttgatgacctcggctacatacagcagtataacggacatagcgagggtgtttctaccattaactagagtatatgatactatagtcaaaggttacagatcttacgccgttaaggtgagcaatcgtataaaataagacatattaaattgagaagactattggaagatacgtcagaagaccgcataaagccgtctattcctgttgctcatatgtagagataatgaacgtatgcgtatgttgtagcattgcttgcgcggtaagatataaacaaattttctcgacacgagcagtccttgctaggctctcccaatgagaagaaggtgcctcgcaccgactgatattaattgcttatctttgggctttgccaacattcggtagctctcaggtacatgaagatgaacagcggtatagccgtagaaacctatgtgtactattccagttggtgacgtctgaaactaactcaacccaagagcgacgagataacgaaacagcaatgtgaaatgccgatgtaaggatgttgatttcaaaataagaatgaaaaagttcagggtgagtcggccgtttatgctgcatctatccttgacaaggtcgaactagcaatctgaataattagcacgtttgagtaagatttcaatgtatatttcgatgtctttctttttctacctattatagccaggatgttaaatctcacttttatattagcatatatttgtggaatcaagaagggacctgcctgttacattgcttatttggatgttttgcttgctcatgagtctctcaaatctctctttgtcccattcgtggccttcgttgctttgcccctacaagtttacacagatgtgatgtgagaagggtaaggaatagttagatagtacagtgaaggtttccagatcaggatgacttagcggctataactagttatgacataaaagtactcccaaggcataactagatagcaacgcagacacctttccacttccattctcagtagtcaccccatgctgctccctctctagcaccctaccactcccaatgacgactctgctctcacacctgttttgcaggcagggctgtcggtgcctctatcctagggacccctcttcaatagatagaatggagatgaattgttgaagaagctagaagccataagactatggaaaaatctagcaaagtgacatacagtaggcgaaggccaataaattcaataaacacaaagcaattctgaaaggaaaaaagtagatagcgtgtttgcgcgatttcttgagccccctctatcagctaaaactcgatgccttatctgcaggaattcaaaacatggcatctatcgtaaaaatatattgtaggaatacttcatgatataggcagtcccctgtgtagcagaatgtattcctttcagacaccaaaggctttgtaaaactgataggctactatccggtgccatatctccaggacccggtgcagtaacgtatgcaaaggggctctgtttatataactggttagttgaaggtgaaatcataatgtaaaagcacaccgtgaagggtctattacactttgtcacagcagcttatctgctataagtttgccccggatcttctgggcactccatgatccatccatgggaacaagggctttcgccacagactttcccgtctccctcttcaacgacgtgatggtagttcctttattgatttggacatgaaggttgtagtattgggggcggccacttgtcagctaggaaaagtagaatgttagcgaatttcaaaatagtgaaatccatgccactcagtgtactgcgttaagataggaagaaagagagctcggtagacagaccccttgcatgtccagcctaaagttcacgtccttgaacaactcatgttctccgtgggtgaagcccaacatcttggaatctgggatgctgttgatgaagtccacaagttcttgggcggtcttttttctccccattgtaaacgtttataataatgaactaggctcggttgggcagtaagaaataagtgatgactttgagaaccgtcttgcgtgaatgatttcttgattgagatggtttgaaagacgtgtcccttctagattcttatagtactttgaaatacacaaataccctaggctctttacctcttcatggggccggcggtaactgaacccctgactacatttctaaactcactgtagtaggtccagaacttgcggagtagacccaggcggttagatttgagagttatcattatgccacgaattgaacatgattttcaaaaagaggctgaaacaagcataggtaccatgcgtaataatagtttaaatatacaatatagatctttttcatctttggcaagatcatccctgggctaaaattacgtgctaatgtggagcattacctgcattagcatacgcgcctgccccaaatattggaaaccgactattggaaaccaattagctcaatgactgcaacaatgtgatgtgatggagatgcaggttattgttattcaggattcaatctattcgcaaaaggcccgcgagatgttctaggtggacattattttagaaatttgaaacaccccctacaggaatcttagagtggcgccatctgaagcgcctatgcacatctattaagtggaaggcaaaatggactagtgtgatagcgaactaatttactttcatggttggaaagttcttttttaggcagtctaaagcagttacttgacctcactctttttagaaatacagctttcagaagcatgtgacagccagtcccctcccatgcataataatagcaatagtaccaacctacacaaactcaatggccgtggcagtctcgcccatatttacccttatcagtatatggagcatatattgagaactggacttggcgaattgcaattggctaaatggaactatcttgcctgggaatattttttagttgcattgcagaggaaaccagatcaaatacatgaatgaatcaatgagaaatacaactcgaactagaaggtccgataggtatcatttctctctagaagcacataaaaaaaaaaggcccagcgacttatgaggatattctcgggtatagaaaccactaagataatacgattatggtcatttggatcatgaggtcaagggcgaaagctttgcggacacgatagcttcatttcggctatatctaaaggaactaacatttcctcagcccagcaaaccggtctaatctttttgtcaataaataattctggtggtatgtaaatcacaagaacacttgaaggtctttgtcctaaattggccagatagggagcctcatggtgactttaccaacctaggaacggattctaggttagtggtcattggcatctttaagtatttgattcaaggtattcagaagacatggattgtttttgatcatggatattggcaggcacagatgttattgagagtgggaagccatcacactgcaaaaagccgacattgttgcactgacgctatgaccagatcctatcgcccaagctgcgcgcattgttcatatcagtggtgatgtctccgatccatgcttcgatatcacgggcggagatccaactgtcacaataagccgccgcatagtcaaagtctcttttaacctggctcttatcaaaaacttccacccatcccgggtctagttttctcatctcatctatgaatatatcgcgtaatagagtggcctcatactgccataggtgctcaaagtacacctcactgggttctcccgtatcttcgggtgcatattcctcggttttaggctctaagcgtcgtggtcgctcctctaaaaatgaaggataggagcaggctttccataaaggcaccgctgaaacgcactcccagtctaggacgccggtcatcttcccgttttcgtcgacgaggatattatgtcgtgagaggtcggtatggaatatcattgacggttctgaatcatcatcatcatcggtggggaagaccagcggaagaagggatttgaggttatcgattattttcagtgtcctcttagcaacatccacttcgtcttcagcgtcgctatcaaggtctccggctgagtgcttattcaaagccgaatgacagtcattttcattgaatgaaaggcgagctgtgatccagtccttacttgagcggaatgggcctcgggggatatcttggtggatatgtgaatcccagaaaaatagcatagaaacaatccggcctacatcaggcaaagcccctgctggagaaccgttgtctggcggattgaatagaagagctcccgagttctttgtcgtaggcgagctaccagcatttggggcggatccctttgccggaactgatattttggtatttatcagctctctggggggcagaatttgctcgctcggtgttgaattatcaacgacagatgtctccccatagatatttccgattccgcgtagttgatttcgaaaaaggcaagcggagcttgccgcaagctccctgatcaggcatgctttcacagcaaaggaaagagatttccagatttcaccgaagggttttccaggcattttggtcatgagcatccattcaaatccaatggggttgtctcgggatggttggtaggcgataattctagggattgggagacttgtgacatggcgcacccaatccattgttgccacttcgctcgttaatttgtaacgtggatcgacgggcaatgagactcgcacgataaatggttcattatctatgctgacgttgtagatcttgttgaatgcaccctgggcgaggaaagtcacttcaacggcgcttgatggccgaagggcctgtactgtctgctttatagccccaggttcgggttcaacagtccatcggggctcaaaaccaaatgtctcttccacccactcgaggccgcggaacggtgattcctgtgattctagcgactgcattttcgggagggggactgtagacgatgaaaccccacttttgccgccgtgttgcaatattttatctaaccgggatggagaaagtatcttcctttttgaaatactgtgagtatcgtggctgtgcatgagctgggggggtggacggtagccccatctcgggaaccttggaagctccagcctccaggttgccccgtggggcttggtattacgcacgtgactcgcatgtcattacctatcttgcaaaccggactttgtctgccaggagctttcctatcttagctgtcactcagggcaatccaggcgttgtcttagcgatctgtagagtattaatagcagctaagcttaggtatctaactatttaactaaacactgaggtctacaatgtacgccagttgttcacaaattggcgagtcctataagtcctatagagtataaattcaagaggtatcaaatcaaacaacctcatagcataattcatcgctaaacactcttaaaaaaatgaatccaccatctagataaagcacatcattagtccgaacataccacctccatagcgaacaataaccacaatcagagtcattcaaaatcccgcgacttttccctctaataaatccacaatcataccaaaaaaggcgtagtcataagcatccatatcataaatcgtaaccttcttccgccgaaaccctcactcaaacctttcccccaaacccgcccctaccatcctcctcaatcccaactctaacgggactactccccccactccaactcccgccctgcgagctgtcactcctactcccactcacagaccctaaagaaagcacatcatcctcacgagcaatcttccgtcctgcaccaatggcaacacgcagcccctgcatggctccgccatgttcatggcccgccgggtacatgccgtcgttgacggaaaagttgcggcagatgaggtaggcacgcatagcggcgctctcccgggccagcgtctcattgctgcagatactgtctgttcggtactcacgattgttgacgcgtacagtgcatgtgtatccgctgttgcttatataggcattgtagattggttcgggccagttgcggcgacgacagaggcctgcggtttggatttggttagtttggttttgggtgggtgggattggttgggctgtgttggatagtgcttcggtgtttgcttctctgcattgggtatatatttggaggcaggatatccagggttggatattggcttgtgtttgcaatgatgtatgacatacatagctcggggagggtgatagtggggagagtgacgacatactggtcaggtagaggatatagtacatcttgcaatttggactggatgcaagccgaaagcgagaaagacgggagacctggagatggcgacgggcaacggcgttgccacttgtccaactgcaacgaattgtgacggttactcggaacgcattggacggatctggcttgcagcgatacgggtttagggctgaggctggcttccagctggtttgcggtcagagaatatgcggattgtgatgcccaacgggtagggggaccgcgtttgctttgctagcagcggggaggatgtgctggcgttccaaaaaaaagcacgattttaagactagtaaaggccaagggtgtctaattcgaagaagatagaaatgaaaagtgcgagagtgagagcgatagagggattgagaacaaaactttggaagaaagattggaaatattccacacccatatacaaatcctagaaccgagtcgccctccccacctcctccgtacaacagggaaaaaagaaaaacaaattaatgaggggaaaagagctgctgcttgccatatacatgattacttctggaaaacaggtggggcttttgcattgataccattcccaagtcataccgcgagctggccggtgtacacagtaccaatagagaagggagacggtcgaaattgcgacagcgcacaaagcaacaagaaaagggggacatttggtatcagtgcagatgacctgaagaagaaaaaggtattaaaccaaagtcaattctaatacccactgttgaaagattgaaggtaaaaaagtcaagtatacagtaaacaatgacagtaagcaaacaaaaaaagtaaacaatcaaaccttgagatagatcctgggacatggatctggaatccgagtatagactacctccactgagtaaacaaagtacaaaaagtacaagaagagaagagaagacaatagatgcacgcaaacctgactcgcatcgaacctcggaaaaggcccccaaaagaaagaggcattaactcaaacgggtattcgaggtattatcgtgtcgttttctcggcgggtttatgatgcgctggcatatctctttgccagtagaatcgaaccgagttatgaggcaccggaaggcaccgtgaactgcgtagtaatgcccctgcaattcgccgatcgaagcataaacattctcggggactaagggagaccttgcaacctgtttgcagaaggtaatacctgaagatcatggatcccagtattccggagtggtttgaatggaatagcggtgctatagtggtactatgctctgtacacgggttatttttttttcgttgccattgctttctcggaatgatcccctcgtttcattttcgccccacgcatcaaagtgcaattaaatttgccgcccttatggatgtcgagacgcgcaggtctgcgaatgctgattggcgccaaggaggggccgttcatgttgtgcagaacgcgcctgaagaggggtcaattgtttatgaaagggctgagtcaatcaaggttgaaaggatcaagtacgcccaatatcggagaatgggaaattgcatgcgctccgaggaagttcagttactcgacaggcatcggactgcagtgatgagctggcattgcagtggggaaaggcgttggatttatctgcatattctaggactgacggttactttttcccccttgggcctcgtgcagctttggtggcaaacagattatgatgtacgtcgtaggaccagtgagaacggcggaaaaggtggaatcttcatcgcgcaaaaggactttgtagactccggaaatcggtgaaacagtcagttcaaaaaatagaaggaattggtgctatgtgctatgaccatgttgtagagccatactcgagccccgaacccaaccccttgcgtctcggtctcattcacagcattatccttagcttgatcgaaaaataatcctcgtggctcccatgccatgaccgctgctatgaccgcggggcttgcagtctcaagactaatcatgcataccttactcgctcggagtccctggttaccaatgacatcctgcttcaatttactatgttctcgagagactttttcaaggaaacttcatccgtcgtggcgctttgtcatgtgtcttctttccggcatcggttcacgcccctcccggttagacagtgaggggttgggcctcggaccagagccgcatttgctccgcggctttgtgcgggatcacatacaaagggtgcattggctttagccgatcaccctttgaaaacacattagctttatcgcggcttggtgaagacttccaggaaaatgacgatgtgaagttgcttgcgacactcgagtctgtccggtaatgatggttttgagtcgcgctcaatcccgccaaaacgtaacaggtgtggtatgaatcaacatgcctgggtcttggtcagctagatgcgcaaaaaaaagaactgtcacaaataggagtgaacatacttgcccggtttgtcccgaagaccaccgtcgctcccttgacaacatccaaggatgtatcgggttagaccttcgcggctgaaaaggctggtggccggtggctcagtgttatccggcttcccttccagcgaagattcaagcaatggccagcatccaccaacccaatgactgtagcatccatccactagcttatttgttcgtccggagagaccaccttccggggcggactggcgggcagacaaccacgacactagcataggaatgtccatgtgtctgcaggaaccattagcatataaagtttaaatagagtattccgggctagcgtcgcacctgtggaagatctcttcgggaggtcccaagatagatagacatgccagagcacaaaaggcgtatgctccgtgggcctctgccccagggctgccggagatacccccttcaaatgtttgacctaagcgcgagcgtcagcacatctcaaaccttgaagacagaactaccagtaatcatacatcgtgagagatattcaggaagaccacttgtcaaactctctaagcccgcctcccgcgcttgagagcccggagcaagcgtcaagggcaagtcaagtagcgagataagagtcatagcgcagtatgcgccactgcattaatgacatgtcagatcttgcattgaaggaggggattgacgagcggcttcggcccaggaattccacgtaccgtacatcttcctccccgccctcacaaacacggaatcccccatcaggctgcttcaatcggccgatccattgccacctggaaaagacagaaaccgggttagacgcaggatcacaccagacgtacatgcagaaggctgccagtgacaactcacatcgcgtgccgatccaccaatccaaaggcctcctcgcctccaaccatagccagcgatagaacagcggcataactgcccgctatatgggatgtctggccgtggccgccgccaaacccacctgtggggttctgcatcggccgaagcgtagtaatcacactaaagtagaagtttagaatggcatcttcccatattccacgttgtacaaaggagacgatcttttccgaaatcagggtatatcccctccaggggctctgtctccattctgtggatatgatatgacagataggaaaaaaagcaaattgggggagaacgaggcggggaaagggaaaataaagaaaataaatcccaaaagagtaagatgtaaagcatgcacgcaccgttcacgaaatcgagtcgtatcttcgcccagcatagcaagccccgccaacgcccagtagacaatccacgggcggctggcgtccatggcgacgaacccttcgggataatcctcgagggcatcgtagaggaagctggcgtggatatcccgttgcagggcaggtacgccatggtcgttgaagtccttctgagtgctgtggatgcctttcaagaatggcaggcatttttccagcgtcgcgttctgcagatcgatggtctccgtgatgagcgggtcgcggatgggtggcggttgcgtgaacaaggccgggatccccgggcgcggatggttggagtctggattcatggctgtagtcatggttgtcctggctgttggaattaataaagttgaagttgggcggttcttagtgttggatttgtgtgcgttcggaaatcgaacttttcgaggtctcccgatgagcggcattaaatgggatctgaggtattttggagatttgacgctcaaagaattgtaacctggactttcttgctattgttctgtagattgaatgtgaatgtagaaaagcctagaatgattctttgtttccccactcgatctctaccggaattcctatctttgacgacatcgtcacaacgtgtctggttttacttttgagtacggagtatttcttttcgagacctattaactagagataggcattctcgtggacagggaatacatagtgctatttgtgctatttgtgctagctcctgcatgtcacagaaaatagttactatatatgtgtgatggatccgacgccatgcacgccggtgcgcaagtagatggatgtgcttacatgacacccttgctgcatgtgccccccaggatctgaatttcaataaactggacgtgtccagtttcttgttttgtcaggattcacgatgctaacttggcatctcaacaggattcggactatgtccgtgcaataatatcttagccctatttttacgatttcggatttattatttcttttcggaaacaccctagtgtatggccagcagctgaaatccactaactacctttgaggcatgcatactccgtagagggaaccgaatcacgggcatgagagtgggcagacagggagctgattggatctgattaggaaggactcaacggactaatttggggataacacgatccgactgtcagatctcaccaaattcttattgccacgcaggtagtttttcccctccccactgatctcccgggtccggttttatgggatgattttctattataggatctcagttatggcctaggaatatggaatatatgtggaatatttatggaatcgtcataatagaggtatgctatacttatgatatatgagatacctatgatatctagaaattaatagtactccgcacataaaacgagaaaagaaaagaagcaaaacagaaaaaagaaaagaaaaaaggcaacttgcccgtttaggaaagaatccaaagaagaaaagaacatcatgggatcagcgaactccggattgccgtcccctccaccactctactccgtacagagacaagggcacgccgtaatctccctccccctccatctcctaatccttcctatcccaattcccgaggcaaaacacctcgacactactgcaaagctagtccgccgtggcattaattcatcgtccaatactggatcaacgttccctccacgccgtcagccagcctccactctccacaagcaactcccctagcgcatttcttcgctcaccgctgctttgtcccccccaccgcctcactttccctcttcttgatggttgtgtcacccttctgaagaaggccctctcatccaggctggtccttttcttccccttctatttcacctccccgtgatcgttttgactccaaaaaagtcatgtccaatgtcgatatatccaatgatggcctgattggcgtcgagtacgactccagaggctatcttcagcatcaatcatggcctataacgttagatcaagcgccccaacggtcagaagaggtccatggtctttccccattgcaaactggcggtcaccctctagaacagtcggtgacccaggacccaaatctcatggtggattggcactttcaaccgctacacacccctcatcaccaccatcacctctcatattcctccgaagacccctcctcggcgtcccagtattccactagttatggcatgcccatgcagtcttcccccgtcgatctcatgtcggcacagggccagatgagcgccggcttgctcgatggtccttatctgccgatgtctgcgccggtcgacatggtccccttctcgtatcaggacttccagacggatttgatgacgttccccaacggacttccggaagtttatgcccctcactccgttcttgaaagcagctcgcccaccgatacttatctggaggtccgttctctgtccagcagcgacaacggttggagtactatcgaccaccgtcgctctctcgattttggttttcccgaacaaggtgttttcgtcaaccctacccagacactgcacgatcgcagcctttcagagtcttcttactccacatcatacggcagctttgtggatatcacaaatccgatcggttctcccggttctgagaacaatatggatttgccttgctataatcaccatggccacgggcatagtcatagtcatagccatactcacagctacaaccacagccatagtcacagtcacagcagctccattggaatgcacggtaattccccgacaagcagcgcaatcgtcctccatggccagtcttcgccaggctctcgctcgccttctgcagtcagccccatcggcatggtgcgacccatcccggtcccactcaagaaatcgacctccccggcccgatcagctggatcttcgcaggtatctgcctcaccgccgagccgcaaaccgtcccgcaagagccccattgccgccaaaaccgccgagaccaaggttcgcaagcagtcccaaactggcaagcccgagaccgaaaagcgtgttggcaagagaaagggtcccctcaagcccgaccagcgccgacaggctagcgagatacggaagttgcgcgcgtgtctgcgctgcaagttcctcaagaagacgtgtgacaagggcgaaccttgcgcaggatgccaaccctcgcacgcccggttatggcaggtgccatgtactcgcattgatatcaaggaaattgggtatttcatgaaggactggaaggcagattacgaacgccacatcactatgggcttctctgtcggtaacattactggattctcggaccaagaacgcactctgttcatcacccacggttatggacagatcctgcccatcaatgctcgcgaggtctatgtccgggacgagcagtgcttcaccgttgactggatggagtcgatgcaccgggatccaacacaatatgaggtcgagactgccaaattatccgctggtatggagggcatctcgcacgcgatgctgtctgattaccttgaccgccacatcgacggcaatggcacatttgagaagttcgtcgatgattacttcgagggcactcctttcctgacgcaaatgctgaagaccgcctttcgcttctacttccgcactaagctgcccgttatccgaaaggcactcaagctggtggttgcttacaaccttaccatgcatgtcaccatggtcgaaggcattggtgaggaggaaggtttcctcggcaagatcgagagcatgggctccaagttctccggcaagaccatggcccccgtcatgatcaacttccagattaaatgtgccatggctagcatgtggcgtgagctgcagaaggatgtgctggaggagctgtcagcactctattcaagtgtgtacagcggcgacaagctgaagaactggccgacaatcttcatcttggcctccattctgctggccgtgtgggaggagatgcagttcgacagccactaccgcacaccagacgcggctgccgtcgacaagttctgcaccgacatggaaaccaccccggtgggcgtcatcgtcggactgttccaggccatctcacagaagctgcccccgttcaccgagtgggattcccaaaagcaccaccagctgttgtactccaacccagatgtttgcaacaccatgactgaagtccgccaacatgtcgagcaacatggtaagccacacactctccccgatcttcgacttcgatctccgaaactaaccccgtcttgcagaaacctaccttcgcagccgcactggcacgaaattcaaccgtggcgacttcgactgcctttcaaataaatttgtgtcgcgactggtcattcgcgccaactagacaacgaccccgatgcgcaaacgcattatgatgatgatatttaccacgactaccgtttccagcagcgagtactgttctgcgattgcgttttgaatgctcaatgttaacactgagaacatgcgaaccaatgttgtaacgatgcgagcgcacttccactctttaacgaagaatccgacgggcccccctcccagcgaggttctgccctttatttgttccgagcgaaccgactttcttttgatccagtcttttatgagccttgttttttttggttttgtcttttgtcatatttacctctttatttttccttgatcataagtcttttttttgaactttcttgtttgacttttttgctcttgtctttggtgtacacctttcttcgcatagctttgtctccagcgatgaacgaggatcacgaatgtcatgaccgtgtacggccgaattgtttctattgttttgttttcatttttgtggcacctggcacccgtcactgaacaggccaacaattcaagttaaaacagggccctgagcacggtgtacaggctgtcttatccccgaactatcacattctttgtggtggttgacgcatatcttcttgccggggaaaggggcgtcggaaggatatttgcggaagcgttctgtttatacattgcgggctttatgctctatatcttgatagtcttttaacttgaattctcatttttttccagattcttgttgatcgaactataaaaagacgaacaagacggtgaacccggatccggctctgatactaagtttggaagcgggtactgggtacccgggagacctcagcagttgccgtgtacagccccgtaccctgtactttctgatcactagcgtctccataataggtccaccccctcttttggcgataagcaattcaacgtcatcacttcgggatctggaggacaaaggggacttgagggatatgaggcgatataagagacctcaacagccttggaagattatagaattttaataatgttaagaatagtctatctgtaggtcatatccaatcaaatataggttggtttcgcaagtggcgtctatgctcaggcaccccgtttgactcatccggcatcttctggcattttcatgggcgtcacctgcgcctgactaagacacctcgccccctcatccttccaaggttccctacataaggacactgtttcccctcttcgaccttttcccttctttcaatctaccattacccacagctcgcttcacacctgagcaaccctctcttcaaatcaacgtcccaaataataagcccatcatgcagatcttcgtcaagactcgtacgttcacacccccttatcgagagataaccgcctggatcccactggccctctcgcactcaactcatggacatccttgctaacacccctttgtctatagtcactggcaagaccatcacccttgaggttgagtccagcgataccatcgacaatgtcaagtcaaagatccaggacaaggagggcattccccctgaccagcagcgtttgatctttgccggaaagcagctcgaggacggtcgcacactgtccgactataacatccagaaggagtccactctccatctggtccttcgcctccgtggcggtatgcaaatttgtatgtgttgactgccttcacgtcctcgtcgttttctctcgactaacatttgccacagtcgtcaagaccctgaccggaaagaccattacccttgaggttgagtctagcgataccatcgacaacgtgaagtcaaagatccaggacaaggagggcattccccctgaccagcagcgacttatctttgccggcaagcagctggaggacggtcgtaccctgtccgactataacatccagaaagagtccactctacacttggtcctccgtctccgtggtggtatgcagattttcgtcaagacactcaccggcaagactatcacacttgaagtcgagtcatccgatactatcgataatgtgaagtccaagattcaagataaggagggcattccccctgaccagcaacgtctcatctttgccggaaagcagcttgaggatggtcgcacactttccgattacaacatccagaaggaatccacactccaccttgtcctccgtctacgtggtggtatgcaaatctttgtcaagactttgaccggaaagactatcacactagaggtggagagctcagacaccatcgacaacgtcaagagcaagattcaggacaaggagggtattcctcctgaccagcagcgtcttatcttcgctggtaagcagctggaggatggccgtactctttcggactacaacatccagaaggagagcactctgcacctggtgttgcgtctgcgtggtggccagtaattgacttacgattctttttcccaacttcgataggttttacatgacctgcatggcgtttagtcggtttttcgaggctgaggcttcttttcttgcaatgtgtttcctgaggacggcttctctcttttactctgcccaccttatcatcattgatatatgatagatagttctcgtcaattcactctagcaatatttgctagtctttatgccatttcattgtattgcacttgtagggtaatactaattcttgactggaattgaaatggtacataaaatgttaccgaaatagatatccttccagcatattattacacctatcttcataggcaattctattcaaccacaccatttctcgccaccttgcgttctagccagagcacgcttcagactctcaatcccttttttgcctctttgccactcgcgtgccaggaaccacttgtggcgtatggcgcagaagcgggcgacagtaaaatattaagtaatcatgcattctttatcgtgataacgacttcctctttcaacgagttccaaccacaatcgcaagctccagaggatgcgagctatcgtccgggatgcccgcttacttttatcaccttagcttgcaactcctctctcacagcccgtctgacgcgccaagctctcagggttcctcctctctcgcgctacaatccgcatgggaagctctccaacctttccaaaaacggagccggtcttcaacctccaaccgcctatcacccgcgggagataatcaaaccctattatcattagaacacactttggcgcatcgccagatatccaccctctccacccgcacaactatcccaccccgcccttcctccgccagcacttcttgcgactccaacaacccctccactagctcctcaaccagcacccaatatcttgaagacgacaagcgcttcggtgccgtctcgatcgagtgcattgacatggtcactccaaagcacccgccgaaacgcacttcgaagcgtggctccgtatctaccacagaaccagagaacctcgtcgcagcaggcatcggcacggatatcctaggcggcctccgtacaaaaggccgatatataccactcgactacgaccttgccgacagcgtctggggaattgtacatctgtaccgcgatttgcaggagacgccttacctcggaaacgatgacgagtaccccgcctatctgaagggctcctcagctgcggcccgccaacccggagagcagcaggcaacgttgaggcagggtctgaccggtacggcgggtggtcaacattctggggcggcgggtcttgcagaatatccttttcctgaaacaagttcctccactacacagagtcctgacgaggattgtacgacactatgtattctcgctgtgccatcttatctgtcgccgccggactttttgggctttatgggacagaagaccatggatgatgttagtcatttccggatgattaggactgcgcgtgcgaatcgatatatggtcttgatgaagtttcggagtgggcggaaggcgaaggaatggcagaaggaatggaatgggcatgtgttcaatagcattgagcctgagacctgtcatgtggtgtttgtgaagacggtcgaaatccaagtcgtggatgccggaacaccatctactgagcacggcgctctctctaacatcccgaccccttctcgagcacctgtatcatctaccggacaagcaactctcaccggcaagcctctcgcgccacccacccctgcactaatcgaactaccaacctgccccgtctgcctagagcgaatggacgaaactacggggcttctcacaataaactgccaacacgtcttccactgcacctgtctccagaaatggaaaggcagcggctgtccggtatgccgatacacacaagatgactaccgcaaaagcaatgcatccctgaaaccagacgaagaaccccaacaatgcagcatctgccactcagaagaaaatctctgggcctgtctcatctgcggcacgatcggttgcggccgctacgacaacgcacacgccttctcccactggaaagaaacagcccacgccttctccatggacctcacctcccagcgcgtatgggactatgtaggcgacgcatatgtccatcgcatcatccaaaacaaaacagacggcaagcttctcgagctacccgctgcagactacagcgccctagacccaccggactggggcgacgctgtcccccgcgagaaactagaaaacatgagtatcgaatacacacaccttctcaccagccagcttgaaagccagcgcgcgtacttcgaagaaatcgtcgagcgcgccgtcgacaaggcatcgcaggctagtgctgccgccgccgtggcggaagtcaatgcttctaacgcctcgtcgcgtctggaagaattacaagacaagtatgatgtcatgacgattgagacgctgccgtcgcttgaacacgaccgcgcacgcgccgagaaaagagcagagaaattcgaagccctggctcgctcgtttgagaaaggattccaagaggagaaggccatgaataggaacatgttgttaaaattggagggtcttgctaaagaggttgatgggcttaaggctgcaaacgcggatcttgcggagcagaatcgcgatttgacgttctttatcagcggcacgcagaggttgcaaggccagggtgaggaagttgagcaagggactgtttctgtgcctgagccgtcggctgcttcgaaaaagaagaggaaggggaaggggaagaagtagtttgggcgttggagaagttttgcatttgcttttgctgttttaataggtgtacggttgggtggtgttacttttgctcgggattgggagtgaacggtgtccttgggtattctcttgctgtgtccctaatagggacatggttggttatatgcatttagcgaggtgtactgagtatgctatagaaacgagtgaacgaatacgaatttatgaaatacattcgatctgcaatgagtacaacaatcaaataatatacaaacagctcataaaaatgcaagtatagatacataacctcccccaaaatcatctaaacccccttcctgacagcccagaaataattcccccaatcctcactaccaggcaccatcttccacccaatcccaggaacataaacagcacccacacacttccacctcatcccctccgcaatcgcacttccgcccttcgaaacacccgtatcagcagccctcatcaacccctcctgcaaccaccccttgacctcatccgggttaacaaacttactccactcatgcgtcccccgcggcacaacaccaatcggccacggcgcttcggcaataacctggttcaagatgaacgacggcagcgtccgcgagatagtagacccaatcagccagccgccgggcttgagcgcgcgcaggcagtttgtcaggaagctgagcggtgttgaggtcttcgggtcgatgtgttcgagcacttcgaagagggtcacaatgtcatattgtgggggggtgggtttgacttcggagctgggatttggtggagtcgaagcgggagttgaagtattagcgttgccggcgagtacatcctccagcgtcgtgttgaggtacttgaagcgacctgtgcgcaggtgcgaatcgacggtcggatccaggcgcgcgtgctcgcgcgccatttggattaggtccgttgaggggtcaattgcggtcattgaggcggctagggttggggttggggctggggcggtggggtcgagtgggattgtgcgtgcgagggactcggcgaagatgccgccgccgcagcctacgtcgaggtagttgagggttgcggtggagctggttgggtctggtgatggggttccttctgctaggcaggaggcgatgaattcgtggcggagggggttcattaggtgcaggattcgggaggggcccattgggtcccaccaggagctggcaagggaggagaagtgggagagttcatcggcggagacggaggatgttgagtgcgcgcgggttgggtgtgtttgagttgatggggcggatgcgggcgcggataggaagtggtttggtgagggccttgttgagcggatggttgagcggagggctcggactgagagagggagggtacggggtcggagggaagccattttgtaggtaatggtgttggttttgggcgaggttgaggttcaatggagaattggctccggtgctctactgagctttaattgatgcggagacccgaggattatctgtgggaattgttagctgaggactttagagggatatgagaaacaatagagagcataccactaagaatatcctgagcaattgagaagagtcttggagaaagcccatgaagctgatcaccaaattggagattcaatgccgaggcaaacatgccaagacaatttggctgctgtttgagcttcctttatggccatggatttgatagttctatgattcagtcatgcctccataaacaaccatctattaaataaactccacttggtatcacaaaacaaataattcgcatcacaaattcaatacaccatcatcccaagagacaatcttcaaaacctagctcctgcggcacatgcggaagagctgactcggcttggccatcgacatcatggatctcaatatcctcggcactagtagcgtaatcccagacattctggcctgaccatgaagccaactgatctggaacagcagcgccgagtataggaaggaaattccctgtggtgatgttgcagtcgagtccaagcacggttctgcaacgatccagcaatattgggaagagatacgaaggcgagccacgaatttgagaaagtgtgtgaagtataccccacagtaactcgttcgggtcaatagtcgactcagccagtctatggacggctttcggtccaagagatctcgtcacatcggcgacggaggatcctagatcaaagagcttttgttcctatatcatccaaatcagtatacaacaaaagactccatctcggattgacctaccatgccaatcccatgcgcatcaacagctccctgcgatgcagcaccaatcacgctcatcatggatttactcaccattactggtaggtgaaatggcaaaactgcgtcgtcgtgtgagccaggctgtgtggcatggctcatagacagcttccacatcatcgtctgcagccactgttgcgtgatcaagatatcaacctgttggacctcaaggactccctctagggaaatagccttgcacaggctggattggatggcggagattggcggcctctctaaaattccatctccgccaccagcggagatccaatcataaaggttcggggtgagattctcaaagatgttgatcaggttgatgaatccgtacgccaggataggatcttccgagcaaagaacctgaggcttgtgaatagagctgcgcagcataactggtttcgcttgctggagagcataacctctgccggtttacaaatcagccccagtccaaacctcattgatcctgcataagcagcgcacttacctctctgtgataaacaaaagccagaacacacgccgtctttcctccgcttcttcaaccccatactctgcatatgtcgactcgcgatgcaacccaagcgtaaatgcaaacgaggtagcctggcacaaaaagaaccaagcctgatcctgacgatcaagattcccgtatgaggcaaacaaaaagaacgaagtcagaagtgactccgtgctaagtgcttccagaagatcacaatcccgccgcgcccgcacagcctccgcaagaagttcttccccagacatcaacgagtgtccacccccaaaactctgcaaacgcgcaggatccggtatatgtgttgctccgtccaatttcaactggatatgcgtagccgcacacagcgacaccaaaagagcataccgctgcgtcgacagctgcccgggccgatggcaatctagccggagctggtccccgcggatcacgggcataatggggaacaaatacttgaggtagatattgacgtggacgagcaggatctgcggcgagagacggcgatcggccggcctcgcatagctgtaaccataaccaattgcagattcgacggttgagtccgtggagcccggggatgagacgagttccgggggcggcagatgagaaaaagtgtccgagaagtcctggcctgcgaactgtgagtccgcgattccaaattctggcgagatgggcgagttgaattggtagtccgggatctcgccggtgccggcatcctcgggatatatatgttcgggagggtcttgtcgggatgagagagggtgaatcggggctaggggatatagggtgcggaatttggggcctttccgacggaggacgtcgctgtaggagcaggacagaagtagccgtttgcatttgtcgcatggtagttcacgggaacattttatttttcggcggcgacagttgtcgcatgcttgttttggcttgggttgcttggaggacattgttaaattgctgctaggtctcgactagacgcgggagagttgaaatttcatgttcaggtggaaatatatattaaaaaaagttgcgatggtttcatccggggagttcggcataacccccattataataaaaaaacaatgcaaacctggggaagcgggggagggcaaggaacagtgagaaaccccgcaaaggcccctgcgttagtattgtgcctcatattttgatcttattcgcattggcgtccttagggatatggcgattctcgctgctcttctagattaagggtgcatttcctctcggcccgacttctctctacgtctacgtacatactcccagcctccgaactataaagaatagacagaagaccaccatggggccaccatgaaaatctactcagtgacccctcattccagatattgttacgacttctaatattaacatggatcccagacctcggaccgtaagcgaagtacatatgtacgcctttgaccaggtacggggttacggccaagtcgggtttgatgcctgactttatggcgctgattgacatgtgcactaaatcgaagatgagggatttcttgccctggttaactggtttaatatagagtgggcaccgctaggccgcgctgagtatccatctccacttagaaagttgatattcgatccaatcaattttctcacagcatcaactgtttatggatagcttttgaactgtacggagtacggaataccgagatggatctctcttatatcgtcctcggcttcccgaaagtgcaaaaaggccttatctccttctatgttggatatcatgtaaggggttgaagcgcatggttccgctatggtttgtatgctttgtacagcttagacgaggtgggactgttgaccagttgaataatgttcctgcgagggtcccgaggttccagacttactccatccttgcgcaccttgtagttataagattatccactagagagaaaaggctcaccgcagcttgccataaggaggattatacgaagcacctaaccttggaagatcataatgatgacattataatatgtaagcaggtttctatacattaattccaggttcttgtattattctgtagccgtactactgtagacgggcatttatcggacaactggccaatcaccaccctggaatgacatggtcaattgtgatcggcggtctttatacaacacaggatggtccggagtaactatcttcctaggcaagtgatatcacattcacagtaccatttcgaattctgccacttgttggtctttggcatgggaatctagagagagatatacctcttcgagcagactctggattgcttttatgatatttgaatatcatataaacatggtctaaaatgcccatgcccctcttttgtgaatcgcaggtaggtaatacggtgtcgggtcgacgtaagggtccacattcaacccagagcccagccttctttagcgcttgaagcttaaccaaccccgcaaaaacattcagccacaaggcaaagtatgtgattgtggagaatcaacggaaactcggccacggcatatcatcgggccgcaacttcctgtacacttgcagtgctataactaactggctacgctcattataaaaacgagctggcatgaaaatagccccggtcgactactagactagcgaagtggttattatggttggcgcgaagaagcttcttggctgtgcttgcctcttgccagcagcctatggtggttacttaaaatccgcccctacggccccagcctctcactctgacattgcttcttcaacttcttcgggaaaatacacacagtttaccattcccgctagcgcagatgttggcgtacagcagatcgccaatattgatgaccccgaagccgtcgatgcgcagtcggtttgtcccgggtacaaggcatcgaacatcaaggaatctgctcgtggattgaccgctaccctgacgctagccggaaagccatgcaatgtatacggaaccgatgttgactcgctgaacttttccatcgagtacctcgccaatgatcgtctcaacgtccaggttgtcccgacttatctcgattcttctaactattcgtggttcatgttggatgagcatgtcgttccccgacccacttccgaccctcatgcttcaaagacgcatagtgatcttgagatcacctggtcgaataagccatccttccatttcaaggtgacccgcaaggctacccgtgatgtcatcttcgataccactggttcagtcttggtatttgaggaccagtttgttgagtttgttacttccttgcctaaagattataatttgtatggcattggagagcacatccagcagctgcgcctcttgaataatctcacattgactctctatgcgtcggatattgctgaccctattgatgagtgagtcacatttcccaaatatatatttcccctcaattgtactgctctttgtttctgactacttttatacagcaatatttacggctcccatcctttctatctagacactcgctactatgaggttgacaacgagggtcaccatatcctcgttgcaagtgacaaggccgatccgtctaaagactatgtttccttctcgcacggtgtcttctctagaaatgcccacggccaggagatcgtcatgaaccctgagggcctgaagtggcgcaccctgggaggtagcattgatctcactttctactctggtcctagccaagcggatgtgaccaagaactaccagttgagcaccatcggcttgccagcattgcagcagtacttcacttttggcttccaccagtgccgctggggttacaataactggacggaacttgaacaagttgtctccaactttgaaaagtttgaaatcccgctcgagactatctggtaaattgactcatcgtgccttttaatggttcaagtcctaacatgactaggaatgacattgattatatgcatggttaccgcgacttcgacaatgatcaatatcgttatccctaccgtgagggtgaggtgttcctagataagttgcaccgcagtggccgtcattatgttcccattatagattcggctatctacattccaaaccccaataatgcctccgatgcgtaagttcccctatgtctgttcttcagaagcaaagctgatttatattcagctatgatacctacacccgcggacacaaagatgacgtcttcctgaagaatcccgatggaagtgagtacatcggcgctgtctggcccggctacactgtcttccccgactggcacaatcctaagacaggcgatttctgggcgaacgaaatcgttacctggaacaagaaaatagccattgatggcatctggattgatatgagtgaggtttcttccttctgcgttggtagctgcggatctggaaatcttagcatgaacccagcgcacccctcgttctccctgcccggagagcctggcaacgtgatctatgactatccggaagggtttgggctcagaaacaagacagaggctgcatctgcgtctgcagcgtcatctagccaggctgctgctgccgaaactggcagttctacctcttcgtccatctcttatctgcggaccacacccactgcgggagtacgcaacatcaactacccgccatatgtgatcaatcatgaccaagatggccacgacctcagctcgcacgctgtgtctccaaatgccactcactccgatggcgtccaagaatatgacgttcacagcctcttcggccaccaaatcctcaacgccacttatcatggcctgctgaaggtcgatgaaaagaagcgacccttcatcatcggccgctcaacattcgcaggctccggtaaatgggccggccactggggtggtgacaatgcctctaagtgggcatatatgtttttctctatcccacaagccctgtcattctccctcttcggaatccccatgttcggagtcgacacttgcggcttcaacggcaacaccgacgaagaactctgcaaccgctggatgcaactatcagccttcttccccttctaccgcaaccacaacaccctctccgcaattcctcaagagccctatatctgggaatctgtcacggccgctaccaaatccgccatggagatccgctacgcaattctcccctacttctacaccctcttccacgaagcccacaccactggctccaccgtcatgcgcgccctggcctgggagttccccacagacccctccctcgccgcagttgacacccaatttctcctcggcccctcaatcatggtcatccccgtactcgcgccgcaagccatctctgtcaagggcattttcccaggcctcaagcacggtgaggtgtggtacgattggtacactcagaccgccgtggacgcaaagccaggtgttaacactaccatccccgctccgctcgggcatatcccggttttcgtgcgtggaggcagcgtcttgccgatgcaggagccggctttgactaccaaggaggcgcgtgccacgccctggtctttgcttgttgctctcggcggcagtggagctgcctctgggaagttatatctcgatgacggagagagcaatgttccggatgacacgcttgatgttactttcaaggtcaaggggtccagcttgagtgccaaggcaaaaggtaactgggaggagccgaatcctctcgctactgttactgttctcggtgtttccaagaaacctggcactgttagacttaacggtatgcctgtcccagcttctggtgtggaatacaatgctacatcacatgtgttgtgtgtttgtggtttgcaggagttgaccaaggagggtgctttcagtgggaactggactttgaagtggtagatggtggaatctttcaagagaatgtagaattgtgtcttttattgtgcgaatctgctgtcttttctatagtctatcctaatggcaatcacattcatttattcatccctcgacacactggacaatccttacacaatggacttgtttcaagtttagtacataccctctccgttcgcaatatcttccgattgttccgggctccttattatcaaaagaccgagcgcctattgttatagtgccggcgactccgtaagctcattcagctgagtagagagacaccacacccccgcggtcgcattaacaaataggctgttcaataatccacagattctgtcgggccgacttatgaagcctatatatattttgatcgcatttcacgctataatatactcacattgtctctatgcatacggagtataagccttaaccatcctagcagcatcgcctaggccaatagcatcccgagtaaaccccgagttcatgagatcgacatcatctcaaacgagccgacaagccactgcaaccccatctccgccccccgcgtccctgcaaatttgggctccaagtccctgcgcacgctgattcgatcaacgcccgcgtcaggggcttcaacagggattgtttaatttcgcacatgccatgcgctagccttgtaatccgggctaataatttcaaggttatgcatgcattcttgtgactttgcttttttttccggcagggctggggacctgacgaattatatgtgaaggatgactatgggatttttgttttgggagatgatctttcaattaatcacggagttcttgaccatatgaagttagcagctctctctctctccttttctagtttcatcttggatatggctgtggctagggacgggcatttagagggatttacttctgatttaagtggaagcatctgtgaagatcttcgtctaagcttttagcgtctattggtttaagttatactccttctcggagtccgatttcgagagttattggcctccggtagttctatttgtctgtcgctgtatgcacggcttttgatagaatatttatatgaagtcccttgcagcgctttttgttggaatatcccgttgctgaacgattttactctctttccacattgattatcagcgctgaagatggttctcgcacgatttgcttggcttgctagcttgattagcattgccattgctgccactccagatgaatggcgctcacggtcgatctacttcatgctcactgatcgattcgcccgaacggatggttcaactactgccacctgtgataccagtgatagagtcggtttctgtctatatatcggctatgtgacaatgagatagagctaaccgtactcgctggatagaaatactgtggcggaacctggcaaggaattatagacaaggtcagtaatactctaatattacctatatcatcaagctgatcgattgcttagctggactacatccaaggaatgggcttcacggccatttggatcactcccgtgactggccaattgaccgaggatactgcgtatggctatgcctatcacggatactggcagcaggacatgtgggtatcgcaaaacagaaaagacagcccttgagacctgcatgcttacagaccctagctatgctctcaactcgaactacggaactgcagacgatctcaaggctctcgctacggctttgcatgaacgcgatatgtatctcatggtcgatgtagtagcaaaccacatggtgagttaatgcatccatgtccccaatcatgcgggctgaaactgatatgtattggataaaaagggctacgatggcgcaggcactgacgtagactacaccaaattcaaccccttcaacgatgcgaagtatttccacccctactgctcaatcgccgattacagcaacgataccatggtgcaagactgctggcttggggatgacaatgtttcgctaccggatctggatacagagagcaccgaggtgcaggacatatggtatgactgggttggatctttggtctctaactactcgagtaagttgtcttctccaatcctcacttcggcaagatatatcgccatatccgaaaactaactggtatatagtcgacggtctccgcgttgacacagtcagacacgtccagaaagatttctggcccggctataataaagccgccggcgtctactgcgtaggcgaggtctttgatggtgacgctgattatacctgtccataccaggaggtaatggacggagtgctcaactatccaatgtgcgaccccgcttgtccatggaatttaccagatacacagaggaaactaaaagctaattgaaaatagttactacccactcctcaatgcctttcaatcgacctctggaagcatgaccgacctatacaacatgataaatacggtgaaatcgacttgcaaggactcaacccttctcgggagctttgtggagaatcatgataaccctcgttttgcctcgtaagtgaaaactcaattagaccaccggaaactccattctttatgtctagaagctaatatctctccttccgaaacccagcgtcaccgacgacattgccctcgctaagaacgcagtcacattcactatcatggcagacggcattcctatcgtctacgccgggcaggagcaacactacaatggtggcgaagacccagctaatcgcgaggctgtatggttgtccgggttcaacaccgacagcgaactgtacaagctcattgcaacggccaatgctgcgagaaaccaggcgattgctaaaagtaccaactatactatttaccaggtatatgcttgtctctatgtctgtcgaaaggaaggaataagagaatgtaaatggctaactcagtcttgacagaactacccaatctacaaagacgataccaccatcgccatgcggaagggctttgacggcggacaaataatcactgtattgagcaatctcggtgcaggaggtgcagagtactcggcttcaattcctgatactggattcgcagctggtgaggagttgacggaggttgtgtcctgcgctagtgttactgccggtgatagtggggaggtgtctgttgctatggcgggtggagagcccaggattttactgcctacctctttacttgagggctcaactctgtgttcgtcgtagatctcgtgttcggggtattggtggtcgactcgaggctcaactacccgcctgtgatatatgtttcttttaatcaccatctatagttattgtgcttcgttggcaaaggggaatgcgtctaatgacttgattggtgcttttgtacttaccttggaaggattcatgaagtttgtatcatattatgttgatttggtgtttacatcgtagcgatgatagtgaattctgaaaaccgaatggagaatggagaatgtattgtaatagttgctaaatgaatccagccatagataagattcactataatgaataaaactacgaaacgaagaatcctcgaacaagtcatgactattttcattcaggtgtgcttttgctgttacgatcctgcgccagaaaaaacacaacacccaaatcccaaatctaacctcgatatcaacctaacatacaccaactccaatgatctagaaccaaaaggccaagcccacaatcccatcaccaatcatgtaatgccctcggcaccagaccaataggcatagccccaccagtcacaccagtcggaggagaatgatgaaacaaatccggagcttcaaacgcaggctgcgaagccgcatacccaggcatcatctgctcaagacagttatacccctcaacaagggaatccaagccctcggagctagacataagctgcgagatatccatgccggtacgatgatggctcgacggaccgaacatctgcatgctcttaacctccgcaaccggggacgacgaatgcgaccccgcggtaacaacactcgcctccgagtaccgccgctgcacttcgccgacaatacacgcgatccggtaggagaggttgtcaccgccgggggcgaggtgcagtaggaagccgcggacttggctgattagcgggtcggtgagcgtgtagtcgcagagcgtgagcgcggcgtagccgacgatgaagtagacgtggtcgattaaggcgggtgcggaggtgaagcgcgtttggaggaattgggttatgattaggcgggcggtgccgcatatttctggaacgaggcgctcgctgtccggttggaggcgggcgactgttcggtggaggaggagttggcagaaccagagacttaggttgagcgttgagtcttcgctggtggctgtaggggtgtgtgttagattgagattggatttgatgtgcatatagggttgatgtacttagaagatgtgcccattccaatttccagcgctccaattcttcgtattcgggttctgcgaatcggagacggtgctggttgtgttgaagtcggagggcgatgcggtatagttggatttctgcgacaattctcccgtcttctggtgtggcggctgcatattctaggattcgggggcattggtcgatgtattgttgttggatattgacggtgcggccatttgcgagggcagagctattgggttattagatcgtatatccgacggttttaatggacagaacatactgtagctgggttgcgcagagtgtattccacagacgcaactgggcaagtagctcgtctggatttaaacgatctcctggcaaggtattcaggaagttaaatgagatgagcgcatggttgattgagatcccgctcagcaaccagtcgtccatgagtccttctttgtgaatggaagtagagtatagacagagcaatgtcaacgcctgcagcatatcgcttgtcatgggcgggggcttccacagcaccttcgccacggcatgttgtacacaaagtgagatatcgcggacagtgtgttgtggtaggccaggcagatagcgcgaagccaagagacatgcggtgttgaagaggagtgtatttgaccgttgaatgctggacggatgatttattgagacccaatggccgaaatattcgacaaaactagcaagatgattagcggagaattccagtggcaaacacacaatcaaacacacagttcaatcaatttcatggaaagcttggaatctacgatgccctgggtgacgatatctccgagaatgtcggcatctgataattgatctctctcgccgaagcattcggcttgcaggtctcgaatgagttgcgctggcttgagcggatagaaagatgaggacatgctatcgcttgaagatattccatctatgctgtggtttctagtttgtaaggtggggctgcagggcatgctgggggagcggttcaccatctgccgcatcagatgtatcatctcccccatgcctcgttcgagagagacaagccgttcttcgatcgatggtatagcggtggcgtcggaccaggttgatgcattgtcctggaaccgctctgttgtctccgggagctcgcaatccagcctgttatgacaataataatcagcatatggaaacgacagactccaaaaaagcaacagcatgaataaaaaggccaaacaaacctaagtgacaagcagcgacgacaagaatgaccacggggatcgacatcacagcgagtcttcagcttgcggcaggtattacaagcagtcattgatcgtcggatgcgcccttttggcctcgcatcttgacacgcgaccgagtcaattcggctgccatcatccgggacaataggcttggtgtcccacgagataggattaattgtagggccggttctcgtcattgtattgggtgttggatggttactgtgggtattgaaggtatgtaggtactgtttaggggatcatctatgtatgatggaagaaagatgagaagttggagagtaggaagagaaggctgatcaacaattggacccttaaagcaaaagcccaaaatcagaaacctgaagatcatgtctatcagggagatccaagccttataatagcgggtcactagagcactagcccgggtgagggcttttagccaattgcgacaagaggccgattactgacgatatcgtagaatccgcgcaggtacatcccgttcatggcggattctagcggaccatggcggacctggggtaatcgaatatgcatccaccaatctgaaaacttcccgccggcttctagaaaggcagcgattgtcggtgcatactttgaggaggggttgataatgtcgtattaactcccctggcccagtttctccgacgagaaccgtaggagaggggggttggagtgggctgagtggcccgatctatactccatacgtccttttgcgtttgattcttgacttgttcgtcttatttcaccagtccgaggttatcgtgggatcctttcccttttccctatctaatgcaactccttctttgcgtatttgtcttgctcggggacttccgccataatcctgatctagacaaaggtctagcataagaagggcagaccttgtagtatgatttggcaatgcctctcgttaaattcgtcctaagtggggggaggttgaggatccaagtggggagggacaacaggcacacaacgataactcggcaataattggttagcatgtgcaatgtctcaaagggaaatggctatcaggcttggggatcgcagcaatgtcaccttgtaactttccaggcccgcttaacaacggctatcctgccatttaatacccttcttgtttagcctcgagatatggcatttccagccgtcctttggctgctttttgttggatctcataggcgaatcttgtttgccccgttctccattttaattctgttttagtttcagctaaatcaacagccagaggatggtatcatatcacattcatatcattgacagcgccgatcgcactgcaattaagatcaacctcaatcttctaagaatatatgttaacgtccttgatcggcctcgttaatcaaatttcaagaccagcccaggatgcaaccctagcaattgttccaatatatcctaaaattgctaatcgcgcaacgttgagtggcaatgcggaagaatatatattagtcgcccgcggagatcatccgaggcatctttttccctggctctgaatgatccaccctatccaagtgcaatataactttcatgcagaggaattactcccgaccgttccgattcttagtgctcttttgtcttggatgcgggaatcccggaccaagaagcggtcagtttaaattggttaatacgcgaataacgtactcctgatcaaatgctggattggacttgcttggctcattgaactctggggtaacagttggctggccaggtccacagccttgacaacgacctagccgacattttcacctcggcctggctcgttatcgggatccttgattaagccccattatgcgagctatatcgagtttattattaggtaaaattttgaatttagcgtaccggaatggcccgtcaagctatgcccagagatttagcgatgcgcctcgaacggctaagatgtgggttggaatcaccgacaagggtgtaggtataggtccagctttgataggaggtaaatagagtgctagacccagtgacaaatacaacatcaccacgatcgtcgcgttaatgcgctctcaacaatactgttatctctcaagttgggagaagcaaccctcgatgttgtagattctagaagatctttctacagaacgccgatcgcatcaacctgtctcgggtaatgatactgagaaagtatatcgctcgcttcttgacggcacagcaatgcagtggcaaaccttgagtcgcggcgcgcaagtggaaatcacaggaagccacaacccctcttactactctttatgagcgtgatgcatcgacgagggggtcaacaaggcaatacagtcagatcaagctgcccataccaatatctgattggctgacataaagtttcccccctattccttcttgcttctctgcatcttccttgcagggctgtctgactcctccaatgaacaattgccatgaaaccacgcgacttggatctaattttccgagagctcgcaagctaggcgactttcgatgcagacaaggttctcgacgtagttacttgcagggaataggtatgcatgctcagagataaggactatttgactactagatattcctatcttgtttagagacatgagctacgtgcacatctttgtgatgtagatctctcgacccgacccaccgtgtctaaagctagcgcacattatagctttttgtccaatgcactattctagttgtacactccgtttaacatagcatcccgatacggccaacatgcaatatatgtgccttgtttcacgtgcataagctttaagcttggacataatctccggatcgggatttccttgctagcattgacagaaggactcccgggatcctaggaaccccgggactccggtccctattatcgaccaagagtcgcaagagccgaagctttcatctagctctaaaagctccggggcgttttcaggctacccgcgggataagtcttgatttggaaattgagtttttgaatatgtacggagtatgtatgtatgtcgagaatatgtggatgcttgcagttgtttagattgcgtctccgcctgggtgcttaggaaaccgttgggttatgtctaactataacgtgcagtccacagtatacacgtgtacattgcagctgatgaggaatattgattaggagactcgcaattcatttaagatcgctgctttcacatgctcggcttaatttcccaatgctagtaccgtgcttcgatgcatttctttctacaagtcaccttgtatattaggcttttcgtcatttaactgcctgctgcgcgtgaccccttctctctgggactacgagcgtcctgtcttcctatttttctgttctcatcgtctccttgcaattttgctttgcttccctggcactgtcgtatatgacagactcggaaagaaaaaagagagcattgtcaggtatctccctagcaaaaatgcgatcgcaacaacatgttctaagcttttacgaagcctaagcaaaagaaaatccaaaaaagaagtgaccgacgcagggatcgaacctgcaatctcttgattcgtagtcaagcgccttgccattgggccagccggccttgttatggacagttgtgtggaaatgtgcgctataagcgaattcttgtgggacacgcttatgcccgcttagacccgcctattgcacacgtgactttgaatgagctgctacaaacatgtgatttgccaaatcaaggcttgtagagttgatattttgcgtctgattgagtaatactacgttcgataagtggcacggttttctggacgcgtttatcacttcttattataaactggattggttgcctcttgatccgattgtatactttgaccagtggtgaagatttttctatgaaaataagattaatgactgcgtgaatgttgacatatttctagctttatagaatgccaatgtggagttaaatagggtagaaatatatgatcaatgtatttaatgtgggttgttgttgttaattggaaatatatagatgagcgctatgttgaatatagtatacattcaaacaggtggaaacaatgctaagatgaggagctgccataacagccaaagctgaaagatgttctgtgtagatccaaaagaacgtgttcataaagaaattatcacggtaagtctaatagaagatgaaacttgcgtagaagacatgattgaaccctagttttggacatcatggaagatccaatgaaggacataaatgttaggtggccagatcccactactaaatagaatagctagtctcgtctttcctcccttttcctctcctccttgtccatcattatccatctcaatctacacctgtcactttctctcacgagacgttccacctagtagatctctatcaataaaccatttgccttctatattacacagtgtggtgccgcataacatgttgttcgaagcagttttgttcaacatacagtcgtaaagaaattctgacgtacgtataggtctgcataagagaagagatatgatcaaccaaagatgataattaactgtgtcagatggatggaagaagatgatctagctactgccatcaagctttctaaatatcttcatgtgaataaagttacaaaggtctcatcccaaagaacccagaagaaacatctctgcagccagataaagagactgccaacacaacaagctacccgtgagaagggaacaagaaagaaagggaggtctacaaactgcataggaatagtgaaagccctaaatacatcaaatttgtcttgaaagcaggaaaatggtatgagctatgcctcgttgttacaagagccagaagtagtaacagagcgatggtaaggtatattgagccaaaccaatacagccatttttcgaaaatagctttggcaaacgacaaccatcaagcccattatcacatagcccgagaataacaaaggtaggcacacgaatatgaaatttccaatagttttagatattcgatattgaaatcgtagtagcaaagtcaagatcaaaagaaagaataaaagagactaccgagacccgagtcctacaaacatagaatatctcacggttataccacaaattgcaaagggaagttatattctagtagcaggtgtttacgagcagaggtccagccgtctgaaattacccgccaagagaccaaggtatttatataggcaatccactagaatagagtcctctatcagaaggtaggccaaatgccacgcttgatactagagtagtctagcggtaattgtaagaactgtgcattgctgtgcctaaatgagatgcgcaggctcttgaataccttaggcgatatgcctgatacctgacatcttgtatatattttctcgtatttcttcatggcattacatgtgcagtacgcacgactaaggcctgaaaattgtgcataagaactagccaatgcacttatttactacttgcatccacccttgcagaactgtggcggctacaagagaatggtaacacacagatgaaggtgtgactacagatatcattttcgatatcacaagaggtgtgagtacatagcagcattcactgctagttgggattagtagttatatgcgccatgcaacgtaatcaagagtctatctacgtagggacctggacatgttaatcgcaaaatccagtttagaacgtggctagccataccctcatcgtaaacgaacaaacagtatagaatctagtggtacctagacagaatctatataagcccataatgatacctggctcatagcatcgaggaaagagttttcatacatcgtcgactcttgtagctactatctatctcgtctacgaagtataacctggttcacaaataaaaacagacccggacgacgatccttgaaaaatggagaatgcaagtgtcaaaaataccaccacggccagactaaacggcactattgatttgagtaattagtgtacagtgggtgggtttgccgatcattcatctggaaattaaagattcaaagtttggaagcttagacatgattaaaccaagatcatcgtagccggcctgtatgtagcgaggaaaataaaaataattatcaacaaataatatgccatgatccaaggtagatcaagggctgcctcaattttaattcccacttcaacgcgaggacgaccatccaatatgtgatcggattaaatcatatcacatattatactgctccgcgtactccgatccaatgattcaaagatgtatgaagtatggagtacaacacatgtgctcaggcatcgtccaagtcccacggagtatacggagtatacggtgagactcaagctcgcacgaacccatccatcgatctacacgcgatcgtcacaacccaaatcctgacatgagacagctcacgaaaatcaaagttgacacatcccatgggaacgagaaacacacatctcctccctcattaagcagggacgtcgttgggatcgacatgcacgttcccggtcgaggcccaaacgcccatgacagcgcagaagagaagacgcacacatacgtagcaagcgcctagcatgtatgtagggtgtacggagtaacggagcacagcacatgcatggtacttgcctatatagtcccaaggttgcatacttgcgcttgcacgcaacgaaatgtcagacgtcgatttcaccgctatatgacgggtcggatgcacgtatttggctactgaatggctaagtggggttgtatcgtcctcgcgaggaaatgagggtgaaaacggaatctgaaagcgtgaggtgcagcaacggggtttgcttgggcttcggttagcagataagtgacagggaggtccaaccgtaaggtagggagggggtgaaggtttccatggactgtgattcggtcgagatcgacgaaaagctgtaggctgtatgtatgtacgctgcacgactttgtcgagtgcgttttgttttagatcgacgagtcgtggtcgccggatatacggagtgctggatgctggggtttccaaggttgtgccagtggcttgcatatccgctgccccccctatgtgggactgggtcacggggttcgtatagtcttgtattttggacgtatagcatgcttgcttcttctagttttgctttttatgatgttgaggtacatcgtgcattctagatatggtcgcgtttgatatttattccctaatcttgtttctacccgccccttccccttttcattcgatgcgttggatatcacttttacaatatgagttctcagtcccctcactgacgtctccaatttagagctatgatggtagaacccacatcggatattgtacccaccgctgcaaagaagatggccgaagcccaagatcggcagtcaggtaagttttcggggtcatgtcaggaccccataattgtgttcttcgggcagctcgggaaatctaaaaacctccctaacagatctgtctactagttgtgttgtcggtacgatattttagtaatgcgatgtgattggaagagagttgcatctgtctcagttccaaccgcacttgattcagatatgtctcgatcggataaaagggccaataaataatattcagcatcccattattgcaaatgtttaatcatatgttcaaccccacatcgaaattaagtctggtatttattgcctcggggctgtcaaagggaaagaagtgccgaacataccccgggctcacgtggctggcacggagtaaaagtaaattccatgttattccagtgtcggcctttgacactgtgacttgcttcttccttattatagtagggtttggcagtgtagaattgtctacattgtaataagcccatgctacgtcgcactgtctgaacaattcttagagaagtgctacggggtttctacgacagcacagccagtcacgtgaccacatgacacgcgctagtcacgtggctacccgctactgctatttatgccaaagggggaaggagctgtgtctctattattaggtgtgtacgacgtcgatactggtaatataatggcagcatcaccgtattttgaattcatggcacggtggattgtagatatgtggactcaacggagggaccgaaaagctgaagtctaaatgagactccatgcagctgtcagttcacgtcatttggaatttattcacaaccttgaaagttaatacttcccacaattctagaaacgcaaaatccaatgcaacctcacctctcggtaaccgcgcggactgaactctaagcgctgccagaaagtcaaaaagaacagagaccgtggcaggaaccttgaaatgaggttgaggttcggtaacagaaggaaaagccaaaaatggggtcgatcttgacagcccgggtggagtacggagtacatgtactgttttagaataatatccactagtttacgagtctatcaatttggaattgattgaatgaatagtgcaaaccatggatcgcgtagccccagtctaaaaatcatgatttctctatcgaaatattttctgggtttagaagtagaaattgagagaaaaacaagttagagagatccaaatactttggatatctactccgtactttgcacacgtatccatatatgcatagagtaaatagaaagcaatctcagtccacaccggctcgcaataccgtggagatatcccccccgaagaaaaaaagtggtgccatgagtcgcaggtaaggcaagatccaggtttccacgggttgcgagccagactatggataggttagtcgcgatgatggagactaagtggagacgggttgcgcggtggacagctgagatctgctccgctccagtatctccgtgttgcttgacatttcagatcagtattggagcgatagaaccagagtataatggaaagtgaatgttatgatttgaaagtcgagtattcctctaaacgcctagtaatgcaattttcgcgggttttgtccagtggcactcatggaaatgcggtgtaacatggagggaaaaaacatgtagagcaaatcatagaaatggtgcgatggattgccaatgccataatttgccgtatacctcttgtgccggttgataataagttcccgcttggtaaacgcgaccaaagaaagggtatcaaaatataatgtctgaccaaagtctccgtaccggacggcaatgcgacatgtagagtgaactccagagacctggaaggtaaggaagaaagaaacaaagcaagacattaaaaaaaaacacatggaaaaagaaagtaaaaagccagtctatcaagctcgccgtatcctaccccgtgactcgtaaatggtagggagatataatataaaagcctcccagtcgtaaagtaaataaaacgctgacgttgcgaatgccgtgtaacgttgaagaatgaacagaaagagaaaaataaggccgtaatcgaagtcaaacccccagatgcaggttcatcgcactctagtgacgaggagagggaatgtgctcatcgacatcactaaaaggcgactgtcgttgagactccgtatccgcaccactgcgcatttggttccgcagcgcaggaagttgtcgtctccgagcattgataaaccagttactaatctgtccaaccaaagcattagcaagccataaagccaattaccagtccctagtcataaaagcactcacctgactgatcgaaagccccgtcctcgtcataaacatctgcttatcctcctcactgggataaggatgatcaagatgctcatggaaccaagcccgcagaatatccgtaacaggcttgggcaaattcccccgtctccgcttcgtcttaggatcaatcggatcacccataatcccgaaattcccctgcccatgccccatcatctgcggcgagatctgctcatcatacccgatagcaggatgtccgtacggcgactggggatgcatgatgggctgggtaaagtgctcgccgcggggatcagacatggctgccgtcggcgcgggctggcgatattcctgggcgatgaaggggtcggagcgtgggggccgctcagaatacccgctgctggcggacgggttcattgctcgaccgggcatggagtccaggtcgcggataggggggagaattgggctgggcccacgggatgcgttctcggatagatgcatgtggtggtggccgggatccggcatgcggggttggtggtctggcccgcgggagactgtgtattcgcggtgggattcgtaggggatttggttgggttggttgccatatgagattgagcgggggtcggccatttcgtggcttgagggtgggcggtcttgtgagtggcggggggtgtagaatggggaggtagattcgatttcatcgtggaggtgagcggggaggagctgagagaggttagatgttgattccatgttgtatttctaaaagcgctttagggtgatatcttacctctctgaatgaggggagggtttggtgagggtgtccggtcgacgactgggttgtatacgaaatagccatattggtatgttcgtctacctcatgggactgtgacatagacaaggtatttggggagggacaaggatagaagtgtccggatgagtttcacaatgtattacaaaatagaactatactcgacagttagaatggatatcagacgagtttgtagttcgaggcttcttcagcaaggtaaaagggaagaaggacgtatccaagaagcactcaccagggaaagcaggctgattttacgttgacatggtaaaataaaaaagagaaaggccaagattatatgcaaggttggggaatgagggtaaagatggaaatgcggtttctcaaataatgcagggccccgtacattatttcaaccaaaaaaaagtggccccgaaatctacattaaagtaaattcaaattaaattaaaataaaaagacatatccagctgttacatgtccatgggaaagtaagaacagggggggccgaaaaatgacgatcgtgggcttggtgggtacatgagtcggagagaccagcgctccgtgtgaagggcatgcggagcggagaagggggcgtaaatcaagagacaagtgcgggattcttaaggttgacagatagagtctttctttgagtctgtcaatggaatagtcttagcgtcaggatctatctcacgaactcctcccggttccatatagcgtaggttattgtaggagtcccgatgttgtgattggatgtttcggggtaaaggagtttgaggaatattgaaaatcgaataattaaattcaaaaagacgtggttcactagtgtacgtcaaattcgagatcccatgccaggccagtgcttataagcgggcagtattgccatttacatgagctggaaaagacaaggtccttgacacactaaggaagatggaacagtatacgattacggaggacttgaaagtacgaatgtataaaagaacaattaacagaaatatactccgtaccactacgtaggacaggttgcatgttcagacaggggcattcgtgcctgagtcaggccaagtgaagtatttgtctgtaattaatatattaaatcctcacctccactttgctttttctggggatttaagagattcagcactcggtacggactacggagtacggagtggttcgtggcgaaatcaaaaagggaacatccactaccatggaagaggaaataacaagcagaatcgagagcctttcgcgtaagacccaaaaagcgtcccaggtggatcttccagacaccgaatcgtaggaaaagatcgccgcttcaagcagaattgtcactggttccaaaaagatcgtgttccgagaagagcttaagccggtggggacgaaagacagacaggttctggatttagtttggacgaatcagaatccgcagaggtgacgcctcggatcgatcgtagattgcctgagcctctcatcggtgggcacggtggttgatcgaccaaccggaaagggagaggggctggtgctggcttacagggatagatcgcctaggggttcttcaatttgcatctccacttccttcgagagcttgtggcgtctagggcctttttttcggtctctttttggcatttctttcctgtcaccgtatgtcagatcaaggatcacccggagaacccgctttggtgttttccttttttttttcccccatcctgttttcacgatattatgcactgggctggtgagtgggtgttgatctgattggagtgaaaatacactcgcatatgatatctcccaggtgcgttgcattttagtcatttggattcgcatgtcaccgatcgtaaattgagatttgcgctaattaggactcgcgtatcgcgtccatacgatgtaatctggaccactatattctggagcagtttctcagcttgacacacacacggcactaacagacccgctctagcaactagtcacattctgagaattcaataatggcgcaaatctgtcatgtctggggatccctggactaagactaaatgcaagctgagtgtgctagtcagccaatcaacgcgggatgatggattcattttttgggtgattttcgtgattgcacagcttcctaaaacaatctagaaagtaaactaaatgtactaaatgcaagactcatattgtgtcgtatatacatccaacccctattaacctgtcttcatctgacacccgagtctatttagttcaaagtttaataaaacctaacactgcagtcacctcgggccctaaggtaagtcctttgggcccagtcgatccacccatcaccaggaagatccctttcgaattaaataaattcaactatttcccgatcggaacggagcgcctcgaagctttggatctaccgagacttcactttgattcgccgttctgcagagatctggcatgaaaaatcggaactcgaaagtctaatttaatgaaagtctcaaaccgaggtcctccggactcagaaactaactaagaaacggagaaaaaagaaagaaattggcattctaaccgaccgtcatacctgccatgccctgagacccccattcacgagatcagagatcgtgcatgaaggaatgcagatcatcggatctcgcaggcaaccagggttgtccctggcgaaatgactgatctgaaatatggttattggtctaaagccgatccattagaggggagatagagagggtcgtttctctgcctcttgcatagtacggagaacggagtactatcggctcatatacctactccgtaccgtcggaggaattactccagattggtgggagcatataactacacatgcagtatttgtcatttccatttcccggttcttgggtctccggctattttattttattttatttctttttcccatttcggtctaaatttggctgtccaaccttatttgcatgattctgacatttgagcttccactttgtccattataaggattctaggtgtcattgccaagaattacttctagaaccaatttcctagcggcataaaactctgtagcatagtaacataataatacaaccttaggcatcccaaagggcccctctgcataaggccaacccgactacattggtactaactacatttctttcagcatgtaccctgtaggcctggacaattcagattgtttgctttttgcctgcccaaaacaacttagactcgtgtcaccggaggtgtatccatgcatgattccggtgtgccaagagtatagttcgtgatgaggccaccaatccttcgtcgccatgtaaggcgatattacttactcttttctctattggtccgatcaatactttactaatttacatgggtcttgctttttagaatgacgtaggtggggtcagaagtctcttgcttgaatgagttaggcacttaggcagtgcccggacttataattcctgtccccgtggagtagtatgacttgttgggtcgtttcgagggtgaaaggtaacgacaggagcccgggtgatcggtcggttatgcgtgagtgcctgactcgggactagagcctaccttgtttctttgtttgctttatgctcagttggcgtttgctacccttgtcggctaaattaaaattagaatcgacatctagcatcaccccgctcgattaggaaagactctaattatatgtgagatgtctacttcctgctacttcctaatgcagtatcattttcgttgagaatatatatcctcctgaatggttcaagccagaaggtcatgtacgagtatggagcagcgaggaagacatagcccactatcatatgtgagggatcgttttcgtacctccttcgatttggttcacaaggtcccagtttcggagacttagcaagactaatacaatttgagccacatgccaaacaaaagcgagggatacataaccgaagttcaagtgcttggattgtttcctatctaaagatgcacaaatgtggaattgcatctatatctgtcgtagtcgcaacaggaatttctgagcattcccacagcttcgaactgagagcgtcgctcacggtagtggaacttctttcggcttgcacttttgtgattactctgcgggcaattttctcctgttcaagcgtctccactagtcgtatgactctatttcgcatttagccctcgccatcggactgaagtctccagcctacgaagagtgaccccacagcgcatacccgagatattgcccggtttgttcctttgcctttccggttactgagcgcggcctgcgacatcgctgatatatctcgcttcgtctgatcaagcccaccagtgacatcaccaagtcctcccgatcgagatttcgcgcatatcccgtagtaaacatcgatgtgaacttgctgtagccaatttggaggcaaggagtgaacgtcgatatttcggttggctagtatcttttctcggttgacgtgggtagtcggtagagaaaggaacatgactggctcggtggctgatgtggacggcggcttcgccaggttattgtagggcacaagggtctcagcctaccaagcagcaattctaagctgccaaagggggataagaagcactgccgcacctcgacccctaccatgatatagcagtgtgactgttgacgccacaatgtataggaagatcatcgccgtcgacgtcttttgggcttctaaaaagaaggcgggaaagaggaggaagaatcaactgaatttttatttcgggatcctattatagtcccagaaagcaataaacaataaggtcttatctctgacctggagcaagcaccatatgatctcagcaacgtaaatttcgacctcgttgaagagcgataagtgtgttattagcatatctgcccaggactcatagcttgatactcaaggttctagtgtgcgtatcgaggcactttcggatcccgttcgactcgaaatttcatctagcacgtcccagagttgttgaccttcctgtgttgtgatatcagtaattataatgaggtctgggtgagcctcagatcgagtttgcacatcttggatggtggcttccacaatggagtaaaggagatcaagatgtgaagtattgggggttggagtcaaagcccttgcagaaattctgatgggaaggagttctgggtttattccgtgttgtgccattttgacagtaaggtgttgagaaagaaagtaggaaaaaattcattagatgacggatatgctaccgcctcatatatccagaagaaagatagccaataggagggcagcgattggtccataccatggttcacctgcgtagaccattgaatgcttaactttatttcttctatgtcacaggtatgatagattttaattgtatattcgactattatattgcctgaaggaaaggttttacaaattaaggagtactatgaagaaacggtagacaactcgacaattgtcaattgtcaattgtcttatcattataagaatacctcaatcaaatcgttgactttcacacaaggagatcaatcatagtccagcacagcagcgagggtgctagatactaaattaatgaagcttggggctgctcctgctgtggcacggagcaggacatcgctctcaccatgagttgctaggtcgcgcagccaactatccacactggcaacggatgtatcaatttgggagcgccattggtcataagtctcacactctgtgattgaggacacagcgttgattgcatcaatcaggggggagatgtagatcggtcgtgggcggtggctgcatggatggaggggctctggccgacacccttcaagcccaccatcgtaccaaaagctagggatacagacgggcaaatcaaacccggacgtatgaccctgcgcgcagatgagtcgtgggcggacgtacttccaataaccaggcccatggcgttttgatgtgtatgcatataagccgctcgctattgcgctcaatcccatcgcactaggagagcagatggtataccaacggagcgctgcaagaaaatgagtagcccaagctttgcccatatcgccattgagaaaaattgcggctcccctttggtccccagtcataccgtcataccctagatttggaatctgggccactgtctgcacgacgacagcaacatcgactactagcgtgccatcgcaagcgacaaaactgacgcctgctcgcagggccatcattgaatagaactcagagaagctagcctggtacccagtaggctggagattaccagcaccgcgggtcacgaaagtccacaaagtcgcgagaatatctgtctctgtatcggcagtgaacagcgatttagtagagccgagccaaggaatagtcgtgattggcggtgccctagcaccggaaacccgatcattgagccatgaacaccaggtgtccaaaattggtttgaccgaagaatgactggcgtagaagtaccagagtcctccgaacataacggtagcaaacacgtattcagcactagaaacgatagacgatttaggaattgtcgggcggtccgtggcggtgcgtataaggttgtccttggcgcccttgacagcgtttctcaagttaaaagccgacagcatgcagcttgaagctatctggcacaaatccttcggccccggggggcctgtctgcatattatcctcaatggactgtgacatagtgaacaccggggcttgtggtatgtcatatatacttgaagctggcggcaaattgcattgtggaggcgtcaatcgtacatcactggttgattcgaacactgaaatggcccggtctatgtaattgtcgagaaggggtataagcccttcagtggcaatctgtcgggggaaggctggatggcgggataggaactccagtccaagcggatcatcactgctgctaggcagtgatggttcaaaagaccaatcgctagaggcggcgaagtgtgcgaagaaagcaaccaagctgcgggcaaacagttcaccatctctgtcaccacacagatggttcatcactccaatcttcagcgttgatcgagaggcagtgctaaggaatttagcacctcaggaatattactgctgatgtctcaatttgctcacttttttcaaggttataatgatagggggcggtgatgaagttgtttatcaaacggaatgatgtttagtcccaagtatcggaatttggaatacttcccgacaggatttatcatatgagattatgatgaaatgaccataaacaatctttaatgactgccacacaaggggatggcaattgacaaaagattgtgcgtatgattcccacggagggaaatggacaggagagagaaaggagaacaaagaagagataagaaaggagagaactagctcactacatggtcctatcattagggacctgcgggcccaaaacgatctaactcatatgtagattagcatctggtgtgcaaggggttcgaacgagtggatgttaaatagttcgcacccccctgtaaagactagctactagcgggaaacacgcaatgggacagctgcagacatatctaggaagtattcagagaaattgccaaggggagaagcctggaaccactggggcttatggtaagttgatgagacaatagggaatcaggaagacagaggagtgtatgactagctctctatatgtagatactattactatgtatgacttgctgggtcttgtagctgactatttatactggcaacatgtatactaatgtaagagcgctttaatcagaagtcttacacttgcatgacctgtagagcctatatcgccggcgattggtgtcggtcctgtgtcgcttgcttctattgtgtctagatatatcataagccactggcctgaactatcgggcatctaccccaaattctgctgcctatctcaacagctcgccaagtcatttataaattcatgcacacagccatggtgaatcatcattggagaaaacctgtcttaaacaaaatccaataacggtatataaaataagcgcaacttcctgtgcgttggcggtgagccatgtcactgcccgatgatggccaacctgatgcaggggtgttgaaacggcccccgcctcttgagccactctacggggaaaaaatacatatagatagacttcattgtttttgcagtcagtttctctatttcctttctcagaagatgaacatcaaatggagggttgaccaggtgccctacacatgtcccttgtgacccgataagactgtctcactttgtttagctgcatagcttggcagggtatcagcccgtttacaaggctgagttcatgcggggagccctgttggctggaagaacgcggcttaaagaggactttttccccttttatttctttcctttctccttcttccctcgtcggttgctttttcatacaagctttttccaaaaacgaaatccatcatgcgtataagtttgtttctcgcaacggcgctagccgctctcgtaaccgcagatgaaaccaccagaatcaactatttcgggggcggaatggagtgggttcgtcaactgaacctccacccatggaccagcacagctgccagcgtcgctgggatcaatgccgtcgctaccacctacagaatcggatgtctgagcgatgcgccgaagtctgattgcgagatcgctacaccctggaccatgatccagggccccaaaacctacagtctcacgggtgtctataccgtgtcaggctcaggatcgatcaatgctgtgactggaacccacaacttcgattgtacttttgccaaggttaccgagtctccttcttgttcgtttagcgtgaaagtcaccggcaccactgcaggcgtttcctattcaacttccacctctacctccatcaaaaatatgccaacgcagtcctacacctcctacgggatcgatgtcacggccggaacagctttattcactgccagtcaggcaactaagactcccaatggggcagccgccatgattactgctgcgccaatgggggcagccgccgtcgtggcaattgctgctatgctttagtgatgggttgactctttgcacacgccgtccctattttaccctggccttttgggtagatctcattcgacgtctcaagaacaatgtttctttttttaagctgcctcagagtgcttaccactacaccgctactttccgtggagcagtcactcctcaatctcaaattgacggcatatgatgatagagaaatgggacaaaggaggcagtcaaattgggaaggtcctcattctggtcgcatgcattagctgacatgatgctagttgatggaataatagggtagagttgtcgggactccttgatgtagctgagactgtcccgaagagagcagcaaatacagcattacaatattgggacagtgtatggagaatgaatattcagatagaaacaaatattgatttatgcatgttcaactcaagactggaagaaagatcacaagggatgaaaccgaggaacaagaactgggataccaaaatataaacgaagataaaaacagataaccacctcgctaaaatgaacatgaatcggacaaagagcaaaatgatggaaggccagtcgacgacctggtcgagtgtgtctagccatggactcgtaacaggaaaaaacaaacaaccgcagagcttttacatgcgggcaggaacaaatatgtacaaaggaaagaccaatgttttttgcatatgattgtaatgagcacttagccatcaaggcataatgcgtcaagccaaccacgtataattgaagtgatcaccaagtttccttacagcaagtcagcatagcccataaacatcaaaacacatcaaaacttacagcaatatactgtccagcctccttcttccgctgccagaacatatcggcctcttgggcattgagattacccttggccatagcaacatcaataagagcagcctcaacaccctcacccatacctttacccgaaccacaaacaaagacacgaccatcaagcgagttgatcacaaaccaaacaagatcagcctggtgtctcacctcctcttgcacatagcgactctcgcccctacggctctgcacaacagtgcgcaccttatcctcatgcacgccccactcgcccgagtaaagctcatcaaggagcgagtccctgacaccctgcagcacccagaccttattggcgcagttagccgactgcagacggcgctgcacgaagccgcggaaaggcgcaatgccaacacccgcaccgatgagcagcattggaccgtccgaggcaaaacgcgttgcaagcgggttcgccatcagtcctcggaacatgggtacgtggagatcgactttctcgccagaggcttcggcggcaatcgctcgccgtgcgagggactccaggaacccggaccctgcgcctgtgcgggacccaccgcgccagtcatcggattcggcgactgtgacggcgatctcaattaggcgtcggcattcggtgcctttgtaatggcaggagatctgggggtcttgggagagggagtagaaacggggcatgagggtgttgagaacggagagaagatggtcgagaggtggttgagagcttgagaaagcggttaggagttgggtgagggagacaaaagagcttgtgcgtaggtcacagaatgcaccttgaccttgggctgaggacagatattcgagaattttcttctcgtttggctcgcttgtgtactcggcgaggaggcggaagagtggctttgttggggcgtaactctggatgtcggagcaccagcttaggacttcgcgacgggtagtgatcagctcgcgaggcttgtcgtcgccccagattgtcggccagcggcctttggttgtgcgcataaggattttcttatcgcgcatagactttgggacacctaggaggttgaggacctcttcgacttcggagtccttgttcttggggcacacgccaattgcaccgccaactacaaagtcaaccatcccgctttcggcggggtagtcggtgacatcaatatcaaagtggtatgtacgtttctcggcaccaggccctgtcagctcacgggtgtggaatagaggcgcacggtagacctggtaaggtgggtgcggctgcacgaattccggcgggtggtcggcagggccaaaggtaagatcgactgccgatgccgggatcggcttgaatgaaacggtcttctctgggagcggggcaatgttggaaagttcactgtccatggtgaggagatcgaggttcaggttgaggctatcaaaggccttgttgccgacaggtccaacgatggaattgaagcctgagatcggtccatctacaggacgcaatgcctgtccccggcaacaacccccaccacagcagagggattgaagcttctgagtacctgctgtgcccacattccccaacacccttcgcatgtcgtccgagttctgggagatgaggacagtagatgctcgtcgcctttgccggacatcctcgaccttttcctctgcattttcatcctccgattgggactcggtgggtggagtcagagggctattgggagaattcgagccgctcgatgcagtgccctgggaggagcccgaggagatgacgttgacattgatgtcggttaccgagagagaacgcacacctcgaggctcttctggaattgggttatctgggtgggaagtcgaggactttgggatttcctgataagtgcctctgcgggggcgggaccccgttgacgcataagtcgacgacggcatgatggattgaacggcatgaactaattcgatcagcatgtgagtctgggactgaattgggattggggtgtcctccacctacccatgacgaaattgagaggagtgttgggagtcaccgaaaagttgtacaaaagtcggcgcaatgagggaagaccggggtatatgagtcgagacgtgacgatggcaaggggatgtagtagaacccccttttttctctttctatgaatagagcatggaaacagaatagtgggatgagggaagagaaagcggatccgaagaattggtcgggacgatagttccgtaaagagaatcgggaaaatcgaaaatgacggtatgggaatgagaaatacagggtctcacagcgttgaagatcggaaacagaacagggattttatcagattcgccacattcctcgtcaccagtatgttacgcggttggttccggccttgatcgtttacatgtaaatagagctcgaatataagatctcgacttatcgttgatatcgaatgtcagcagtaatcaggactcgactactggatatggtaccggctccatttggggtcattgtatccatccagatcgacggtgcatatgaaggtgcacttgtactttccccgtattcggtggcggaaaccgccgagagattcccagttggctgctaccatattcaaatgtcatatgatatagacatatcttacgttgaccaaggggattctacacgggtgttttgaattcgcacaagaaaatgcaagttccggggtgggccgacaggaaatgttgaattggaacaggtgtaatgtatgtaacgtgacagtaccatacatgatacctcggttatcagatcaatcagatagcaaacagcggattccaatgtccgagtatgtaatcatatcccatctgataacccaacgtgtctcgacgctctccacatgatgtgtgttctatttgcaaaggggcactgattgcaatcaaaatcccctgagtccaagcctcgaggccccgtctttacaaaataccaaatggatctcgctctatagactcccccactttccgaccagccggacctaccggtagagttatgtatcccgttggcccatcacagctctcatagcttacacgtcccttaccctcggtaaaccaatttcccaaccatccggtccaatgtggggatgccaggccgagatcaatcagtgggtcggattttgaacgagctagggatgttctagaaaaccagtgaaacagatcacccctggagctttcaggctgaaaggttcactgataggctggtcgattcaataataacataactgaagccactccctaccggaatcagctgattcttttgtgcatatgtagcccgtctcccgggcttttagtgttttcaccaagtctctattctatactagtggcactgcattcgcgatcttgcatcagtccattcgacattctttgtcacgtcgggtaggaaggctagggtttgcgtacaaagtacggagtactccgtactccgtagtcacgcgggttataaagcgtttgagttatagggggaagaaaccttagaagggctaacaggttccatctgataacttaattttaatgccgatggccggctggacttccgagagacctcctaatcgagtaactatcatcacagataggggtgtgtaccacgtcattattatacgatgttggtctgtttgaagacgaatgaaataatgataatcgataataacagcagaatcccaagaccgtacctacagtatatacggagtacgtcacgtcatcacgtcatctctagcatccaaacataaacagaaaaataataacagaaaagaaaacaaatcctccagcccaaccaaacactctaactattttcatcccgctggaccaaagccacaggcggaataaaatgatgtcttccccgaaccaaataataaatagtcgcagatccaatgatgccaacatacatcgccacgctccagttcattgtttcagccgtaacatccgtcgacagagggaaaaacgcaaagataaagatcggacacaggaacgccaacgctccaagattcactgccatgccaaatttcccaagtgaccaccggtggtgtgggagcggctcgccccgaatgcgctttaagaatacgcacccgatcgagatgatataagcggataaaagggatgtgatggtgagcgagatgacggcattcagggcgacctctgatccgatgttgatcatcgatagtagtactgtgataactagagataccatcacggagttgagggggatgttccagcctggtgtgacctggttatctgttaatactgctggacttacacctcttattaggatgtagaagacgtggcttacatatgcgaaaaaggacgaaaagggcagcccctcgtcccgggcaaacgaccagagctggcgcgatgccgtcgccacttcggtgattgtgctggcggtcagcgtcaccaccagcacggcagtcatggcgtttgtcgcggcgatgctacccgtggtgttgtagaatatctggataaatgggaatctggtgggggtatcgaggactctgtcgacctcgcctagggtgaagcacagtgtgatcaacataatgaaccccaacacgccattaacggcgacagaggacatcattgccttagggagtgtctctgatgcgtctttaatttcttcggcttttgaatgtcagcatgatataccatgtctgtgatcattcgtggagttcttccttacacatatgaaccgagcaatcataaccaagcatggatgttatggtagtggacaagccgaccattgttgccgtcccagggctatcccagccgcccccattgttaaacgtggtgaagactgcgtgggcattgttgcgtggtgcgagtacccacaacgggatgatgatagcgaacaaaccaacaacatgaatgatcaaaatcagtccttccacgaagggaagattcttggctaagaaggtgttgaataagattgagaatgtcgaaatggcaattactagcatggtgccatgccatcgctggaagttatagtctggctggtttaagacgatcaggccttgaatgattgtgccagcaaggtaggcgatggatacaatggcgcattgccaccccattgcagaaagccatcctgagataatatgatatgttagctggttagacttacacaggaactggctatgttacctgtgatatagctgaggtatttttgtcctctctttggtgcgaactccgacacccaatggtactgtccaccagcagtgggagccctatttatcaattgattagcggtgatttgtgaagaagcagcaagccgacagtcacctacatcgaggccatctcagcaatgctggcgtagacaagtgtaaaccccaatgtgacgctgatgaacccccatatcaagcccgcggtacccccatcggtcaagccagccgccaacaatctattaatggagtcagtagtctgcataattatcatatgcagggactcgcacatacgtcaagataacttcccatgtgcagatcaaagtgcatccaaatcctacaatagaaataaaccgaaagtttctctttgtgatgttaacacagccggaacaaaaagagtagagctacttactcgtagaacctgcactcgacctagagcattcatatcacgcttatccgccagcgtgcccatatactgaggctcaacaaggcctttctccgcgtactcctcgtcgtcaaggccagtcatcgtctgctgtgagtcaggtctggatctgctgatgactgtcatgattgcgggcgtggctgaacgattaaatgtaatctattgaagatgagacaagaaaattctccgtagaaatataggggattgcgagaataagaatgaaagtcaatatcttctggcaactcgacgccccgggggatctagggtacaaaagtgccaatgacaaaagcaccctctaatgaagcgaacaaaaatgaatgtaaccagaagaagaaggtattaggagaaagcccgaaggactagaatcatgacggccactgaatttcggggattgaagcgtggtattgacgtgggagcaaggcatggcctaaggaaaattctcgtgcaccatgtgggagagcacatctcctcggaacacccaagcagcgatccgaatgatacatcgttctttgccaaatggtgatgcatctaattcgatcgggaatgggactgttgaaactagtttttggagtttgctatcccttgtctgttgcccggaatggggctattgcgaccttgcatgccaggggttgaataatacctgtaatcttggaagatattggggtttggactgactgtcggggttgtaatgccactctaaaaacttctaatacttctatatatctctatcactgttgtatataaaccataacttgtttgaagaacacacttaccgaaattgtagccgatacaaagtacgaaatataaacaaacctaaccccttcggtaccgctgcccgacacatttctgatgtatcatctgcgctagccatctagacctattaatccctgtcgcacgtccctcattgcttatcccccagacaattccgccacactccatgcctagctcgaaccaaataacgggtggatgcatgaacccctcgctttatttgcccaagagaaaaccgcatggcctatcggatcacaacctcctaaagacccacagcctaatcccgaaggggcgcacgatgatcgacaaccctacagcggaccgccgtgccctaaacgcatgttcgcagtacggataactccgtactacatcgaagttcgacgtgagggagagaagtaaaatcaccattccaactgaccttcgcttaaaccaaaaatgataattgccaccatttatatcctataacgaaagaaagggataaaccagccataaggctttcggatacacctacagcatccgcccacatcgagcgaatcccaccagccctatttacgtacatgcctgaactcgatagtctatcttttttatcggatatcggcatatgacctacgaaggcagaacaatcataatcccaagtgagtgggagaaatggaacctagcttaacctttattgcctcgccttgacgcccgcatacctcctgcttgtgcttttctatacaacgtatacaagcgtctcaaatcgaaccccttcttccgcagtaatttacatcccgccattcagtgcacatggctcccggatctgacagcctttcacagtcgcttctgtgtctgtgttgatcagcgaatcccatatatacattccacatactatcaccacagtatatccttccctccacatgacatagatcataaccacgagaagggtacttttgagattatatcgtttgcggcggctcctgcttcctcccctgccatgggcccatatgtgccgccaggccagtcgccacccttcgaggtcgtcgatgacttacatcatggcgcatgggtgataattaccgccgcgctgggactggtcgtatctctcgcatgtttcttgattcggctatatgtgcggctcatgctgattccgccgtttgcgcgcgacgattggattttgttgggtgctacagtgagttagggcttgacaagtcgagtcaagtttggggtgggagaattatctgagcacgtaccctgctgacatattatttttacttgttgtataggctaccgctgtggtacaatcaagtctcatcttttatgcgtgctcgcgcgggttcgggacttctatatcgttattgaaggatggtcgactcgatcagatccaggcagtaagttgtttgaattctactacttcaatggacctaaactgagcagctacgaagttaattgcagcaagcgatatcatcgcgctgataataatttacctctccaaatgctgtgtcgtggctatctacctccgcctcacgcctcagaaaccacataaccgcgcatcctgggcgacattagctctgtgcactgcctgggttatccctgctatattcattgtcctagttaactgtgagctaaacacaccttggcggagtgatggtgggcaatgcaacgacttggtacgtaaaccccatgatataccacgcatcagctccccgaagccgtttctcacctcgcaacaatagtacatacgatggcaattcatcgcagcagtcgatgttataaccgagctccttctcttcatcttagccgtggtcctcctcaaaggcctatttatgtccgttcgccgcaaactagccgtcggcttcgcatttatattccgctttccgtgagtaatctacattcaccccatcctcaacctcaaatccaagactaaccgcctaaatcaagcctcataatattctccttaatccacatctcaaccctccacacggccctaaagagcaaagatacaaccctcgccgccgtcaacccaacagtctggatgcaagtcgagctccagtacgccctagtcgcatgcagcgtattctgtctgcgacccttcatggcagccgttagcactaactacggtacggcgggtgactcaacgctggaaggtagcgcgtcgagatcaaacggaacaagagaaggctcgaagaccgggtctgggtcgggctcgaatccaaataccgcttcgaggtctgtgtcacattctcgcatgcagaggaaaagagttggtacagggtcaagactgccaccggttcctccggccgttagttctcaatcgcaacagtcagagaatcatggccctggtcagggcgctccgttgtgtcttaataccagtacccatgcgcacagagcgcttggaaataatacaagagatgggtatagtggcagctcagatacagtttgcccaccagtgcgtcggtcaatgttcccgctcagcgcgccgcgcaagaagttgagctttcagatgctggataaagggaagaatgggataagggctgggtctgggggtttgtttacggatgagtcggatttgattgagcttatgccgaggtcgcatactcggcatgcgagcgatgcgactgagctagaggatgaggagggggcggataagatggttattcataaggagattcggtattcgattcaatatgaggatgaggatgaggctgagttaaggaggcgggaggatttgaagattaattctgttgatgttactgcttatgtataattatatctctatattatgccttcttgtaggatgtgtggatgtgggatattaaagggaagttgtacacaaagtttcaatattataacgcttcagttgttggtcgcttgaaaggatgggcttcagtgctcctaaaaagaaaagtgttagctcatgaagatagtataaacacagctggccgcaaacgtacagcacatagtcgtccagactgatatgatctggctcagaaaagatgagatagaggtacttcaaagtttcggcaagccaaaaactctccattttgtcctcatgtttcggtttcaaatgacgcacatcgttaatagacgaatgaccaaatttagttcgggtcgccttgtcgatattcttgaacatgcgccacgcggagtcttgaagagtcttatctccagtaatccggtacatgacgaatagagactcaagagcttcaggtctggatgaggcgtatgttagtgggctgcactgggaggaatgggataaattcgtacctgagtttatacgatgcgtctcggacactagtcacaccgggtggcagacgctcaacctcgatctggacctccgctttttcgcggtcctcctcggtatcgatagagtgcgatatgacatctgacatccactgctcttcatcccacggacattcatcaatgtgctggcaaggactgactctgaaaacctccggcataattcctgaaggcataacatcatatgcccagacgcagccgtcggtaagtccccgagcaacatacatatcctccggtcgattgaaaaccttagctccaatagccacggtgccacccatgaagcacttgaggtggtcaggcgcgtactggaaggtcttcgagtcaccccgtagtgcgacgacgttagccgtaaagagaaagtgttggtcctcatcctgggtcattcctctgaacagcagattctcgttgaatgtttcaatggccttttcgtacattcggtgatatttgtctgtctgtccacctaggagaatatgttccttgggcaagtattcgtacgcggaatcggcacatccaccgatagtgaattcggagtcgtcgaatgtcattaggtcggtgttaatccaggtcggccacatgccaggcatccgggtcttgtcttgtccgatttcgagctcgttcatgatccgctgcacggcatcgtagtacttgggatcaccggtcaattgggtcaggcgagtgaactccatcgtcaaggagcccatttccgctaagcttgtgcgtgatgatggtgtaatttctttgccttgggcggatctagatattgtcagtcacaaattctccttgcgtattattttctatttgggcataccttatccattcccaacgcacttggggcatgcgattatgcgtatcaaacgcattgaagatcatctcgcctagttcgacagcctttctcagcaggataggatgtttgccctcggtcagatcatgagcagcaataaagccacccatatagcgaatgatgatctcaaagacaggcacctgcctgctcttggtcgttgtaaagtcgatttcctccagagcttccagagccagctggagctcatcgtccagtcccataatcaccagcgcatctagcgaatcaacaagcgtggcaccccatccattaaaggtatcctggtaccctccagtgcgaggtttcacctcgtctcgcatccacgcataatccttatatccattccatgaatgaagaaacgcctccttcacagcatcccgcttcttgagtctggccttgcgctcaccgtgggtttcttcagggaagtcatgctgtatgcggggaattttcgctgaacttgttggtagcggtatgtactctgtaacagggaatcgctcggtgactttatctagacggatagcatcatgccgaatagtgctgtcttttctggagattggctttgctagacgacctcggcatgtttttgtactagggagccagaagaggaaaacgtatgtcgcgacaatcagaaacaacgctgttgacaaaggtcgatttttgcgcttgttgtacataataaatgaatggaatagggagatttcaaaataacccaagagacaacaaaggaatagtcataggaagcctagagaaggagtggaatgatgtacaagtcaagtcaagtagggaccagtagcaaatgccggcatgtctcagtgaacaagatcctgatacataattagagcaaacaaaggaggaaacatattttacaaaaggtggcacgtcatggattgtgagaggtctctagggaatcagacacggtttggagctccattgatcgtccctggtggcttttggaagttaatgcgaggtatgatcttggagagcatcgaatgatcattggcgcaattcgagaatgtcacccccttcacacctggccacgcaacaagggaagactgcagggtccaatctgtagagttattaatagagtaatatcaatggtcaagtctagactggtgagaaaagcgccaagacggtttttacgtctctctgctcagcgccaccaaccccaccgcggcccctgactgtccctgatagagtagttaggtaagggttgatcttgacgattttcagactggaagatcggacaataacacattgtgggtctgaaagctgtgctttggtatgcatatgtaccctgcctactggggcttcctatctcagctgtcgccacttttagggcactcagagtcaggttcaagtaaagttcaattagggcaggtagcccggggtcgtgaattagattacataatttattcattcataaccagccatcacgtgatgaaccagtgaggtgctcactaaaccctcaccctcaccataattacccaacggagtactttgtttattttgcgataattcgttgattgccctcacttctcaccatactctgaccacccatatggacgggactcaaggcccaaaaggcggagcactccagagtttataccttccctatttgtcgtttccttttcttcacgcttcaaccgactttccccctcaagtcccgcaagaatagcgtctctaaaaactgatggcttcgcaggcccagatctttctcttcctgaagccgtttctcgtaccataccttccttatattctatcccaaacagtcttccagatggatacgtcgtcaaccactcccgtttcgagttgctgcgcgcctgtgccaaaaatcttatcgagtcccttcagtcaaggtcagaaaaccagtggcttgtcattatcggcttatcccgatcagatatacacaaaaactcgatgaagaccacagttgtttggggggatgggttataggtttacatgggaaggacatgctgggctcatcaagatagtcccctccttcgagcgcaattcggtcgtggatgggcccaccagggtactggatctcgacttctaggcgagaagggcattctgaaagtcgacatggtgactttctcccttgttctaagggatagtacttttgtgtcttggtagatccggtatgagattgagcggtatgtcacttggctgtgtaggacctgtaagaataatatgccgaccttcggttcttgacgaggaagaaatggaaaaacgcactatcggaagcttcagtaccgtgtctagtggcttggacatgacttggatctctaatggtacccgccaggcaattccaagaacgtgccagataagaccacagatttgtgtcgacaaccagcagaaagtgggtagctaccacgacatacaagctgaccagggattccttcagccatctcgccgccctcccagctgaccaacactcaccgttgagatggggctttcagaatcgttatctcagctcagatgaaatgccctatagtggctatctaactcttccggtgaggttcgaatcgtcttgattatctctatgttaaaaaaaaagataagagtttccattgaaaaatggtaactagcactaccgaatagtccacgccccctcgagagaaggcatacattcaaaccctataccaatagatccgaagatccctcggctaatccaacagcaagtagtatcgcagtaagcgtactgtgcacgaggtcgaggtttccactggtagcatgtctggtacagtttcccatttattacagtgtatgatagaccaccggcataaggggagggagacattgtccttaccgcgcaggattttctagatttcaccagtgatctgatttaatattgcggtggtttgctttttgggagccctggatatattcgctatacttctccataccccttttttcgtttcattaccaattgaatctgtcacacgacaggaaaatgaatgcataatatactttgctttcagaaaattctctagattctgcgcagacgtatattattaggcttctaataccttgcaatatcataataaaaaaagaataataaaaggattcggttcatccgaggaggttgaaatatgtacactagatgtttgctttgtttgcacttcaatgctatcatgcaggctttcatctacaggctgctccgtacttgattctccataacaacctcgtatacatataaattgtccaaaggtaccagtttattcctattttcaatgtttatactaatcaatatatagattgaactcccgtcctgtttaggaatcatcttttggcattcctctggcactggacttgatcatcattgctattgatcgatctctatatctatattgcatggtcgctacctgctacagattcccaaatcaatccttcaacaggacttaagactatctgggaacctatcgccgcatcaatttcccaattgatatccctcagctcaacactgctgtggccattagtcccatctcttcctctgcacctgcccggaaaacaaacataaaaatgcctatcacagggtaaatatactccatatccaatagaaacacgcaaaactaacaccccaaagcgtctacttcatcccctcaaacccaaacgcctcaacagccctccaaataataacagagcgtctgcgcgccgccttcccaaatgaagaactaatcccaatcggccgctggggcctagagcaaaagctcctacgcgacaccccaggtctactcccctcttcaaactcaaacaagaaaccctcaaacccacgctacatgcaattcctctccttaacccactacccaactcacggcttcatctacacctcggagcccgagaagcccatcccagcaccaaaccaaaatcaaacccaaggcgcgcctggccccgtaaatgccatcgcgccagaccactccgcctccccgccaatgatcatgacgactgtccccccttcctcatacggaaccctcttccagcacttcacctacgcttgtcagccattctggagccatcggctcaccctcactgtcccgaacgggatcgtctacgaggttggtgacttccgcgtgcgtcttggtgatgtccggcagacgttcccgacggcgcgagtgcgtggtaccgttgttgagattgagtggcgtggtccgtcggttgtagaggccattcccgtagatcgggaggatgggtcatttggtgctggtgttgatgctgggggtgagggtgatgtggacgttgaaactgccgggatcaacctcgatagctctgcaattgaggagtccgacatcgatgccgagtatgcggcgactgcgtcgttgattcgggagttttgggggagattgggtgttgaggctcgggaggcgattcttattccgaacgttgggatggaggttaaggatcggctgaggaggtggaagaaggctgagtcgtctggcattgacgctaggattgatagtagagttgatggggctagctctgtaattggcgagcgtgccgaggaagatcctaatccgtggtctggggcggatgttgcgaggcaatttatggaggttttgagatttaatcgatagctgggtgtttatggtggcggttggtatgatggttatttcttatacgcttgctactgtgttttgtggacattggctggttggaacaagtctcgcactataggacatagggatggagccatcattcctatattatgaagactcgacccaaagtaccgccagtccattccgtctgcatttcaaagcgcacgcttgatcgtaaatcatccaagatgtatagcctagtgagcatagactacaggaaatcggtattggaaaattgaaatgtaagagaaacactctcgttaaaaaccgcgacgtcagctaacatggaaaaaggcgcacggtgaaatgtgtcgcttatttttgcatcatgagctgaacgaactcgttgtctgtatggagagggagaggttagcatttgggcaggcaagtgccggtaggctccaagattgtttccaaacatacagtcgattcggccatcaccatcctggtccgcctcgcggatcatctcgtccacctcgtcgtcagtcagcttctcgccgatggaggtcatgacgtggcgaagctcagcagcggaaatgaacccgttgttatcacgatcgaagaccttgaatgcctcgcgaatctcctcctcggaatcggtgtccttcatcttacgagccatcatagtgaggaattctaccgcacgtcagtagccgtctctcgtttataccaggaggttatggtcaaataccggggaagtcaatagtgccgttgttgtcggcgtcaacctcgttgatcatatcctgcaactcagactcggaggggttctggcccagcgagcgcatgacggtgccaagctccttggtggtgatttgtcctattagtaggattgtatgttagaatacttttctcgtgaaattcgatcgcagaggacactgagctgtcgggcgcgaccacacgtaccatcgccatccttgtcctatttcgcaatcaaaccaactccggtcagcatattttcgactatcaagtcttcaatctgtatggtgagtcactcacaaacagggagaaggcctccttgtactcagacacttgctcttcggtgagggaatcagcctggagaatgcgatggtcagtgaagttcaaatgaaatgccccgcaatgtgggggttgaattttcgacaacacaactgagaagttaggggatcagggacataccatgatgaatgtagatggaaaatacaacaaagtaaggaggggtcaagtgaagaagagggttaaggggaatagccttacaagagttaccaaaatagcgtgcctgaggtgcccagtcagcgtcgtttcatcttagggcggtgggacccctctctggggctgaatgttgccacaattggaagttggaatgcatgttcaggtcatttttatatatattcttggcttatttcatatatctaaatatctgttgaaatactgtttatcatcgccttacttcctgtatgctcatgcggatgtaacggacagaaagcttgatcccggggttccagggctacgttgagcgggctaacagtactataccgaatcgacgtggaatggagccaaattgcttaggggggtcttggctattatttgtttggggatttctgtttatcctacttaatagagtgtaactgcggggtggatgtatagatctagaagtaaacactgcaagacgtcctatattaattgaataaagcgatgtgttcttcaactataagccttcgacaatgccctatttctacctatttaggctcaaaacccggggtttccatgtcactcaattgagcacgcgactcatagtaaagcgatttgcagtgattggcacaataacactcaagacctcagtgtcttttgatagcaaatatgtccaggtcaagctgtcttcacagtttacccagccataccaaaattaccacaactccacgtggacaaaaccaagggttacatggtgaataccgggcatacgtgaccccttccgacatgtggagagctcctatcattcacttccggctatatcgagaccccaatctccctttgatcccagtctatcaccccccagctgatcatgattccataacctcaccaaattaataaactgacataacccgatcctacgaacgccctcacaatgtggcgggatcgaaccaacctgtatgcatccccatgtaccctaccctacccaagcgcaacccgtcatcgccggacagagccaaaaaaaaagaaaagaaacaccacccataaaactcagcctataaagcataccagcaactaacactccacctccaaatccagctacctctcctaccgccaatccctaatccaccacccagctaaaaagccacacttcacaccaaccaatggcttctccgacacaccctcgcacccggaggaaaataggcgcctaatatccgaaacagacgaagatggcgacatggtcattgaaatggacctcttaccgccgcgctgggtcgacgtgcaggaagaggtctccgagcagttagccgagattgcccagaactccgcccagctggacaagctgcaccagaaacacctgctccccggcttcggcgacgaggacctgcgcaagcaagacgagggcgttattgagcgcttgacgcaggatgtcacgcgctcctttcatgattgccagcgcgctatcatgcgcatcgagactatggtcggcgagtctaaggcgcatgggggtgttacgagtggggaagagactatggcgaagaatattcagatttcacttgctgcgagggtgcaggaggctagtgctaggtttaggaagaagcagagtacttatttgcggagtatgagacccttctttctttttgtgttcttgttcttgttctcttcccggtgaaggccgaatcggttggttccatgtgctgatttgtctctgtccagaattgcgagatctcgagggtatcgcgacaccgttcgatggcacggctacgcagacccagaacccatacacggatccgtcgatgatggagtcagatgccgacagatccttttcgcagaacatgttacagcagacttcacaacggcagaccggtcagaatgatgctgctatcgcacagcgggagcgcgagatcaatgatattgcaaaggggattatcgagctttcggatattttccgtgaactgcagagcatgattatcgaccagggaaccatgctagaccgtatagattacaacgtcgagcgaatgggtaccgaggttaaggctgcggataaggagcttaaagtggtatgttccttctttactagcaacttccccccccagagcgaggaactgacttatataggctacgagttatcaacaacgaaccactaagcgtaaggtcatgctattactcctgttgatcgtcgtgggaatgataattgtactggttgtgaaaccaaaggggaagtcttccccgccgccgcctccggaggatgaatcttcgaacaatatccgctccgtgttggcttaccgggggcgaagacatcagttgtcgaaccgcttcgcgcgagatcgatggatggatccggatatattccgatgatgtttctttttttaatagcattggttcatagttaatgtgaccagaagagcagacgttccctttgcatattggtagttgctgtacaacatagctgcttagttttagagtaaataggcaatggatatggagatgctagatctcacgcaagacacttacttgcactgggaaaattcgaaaattggactacagacctgtagatcaatgccaggttacattatacatttaattacttcatacacgagataaatgatatcgaacataagccgattgaatagaaaagaaatgaataaatcacacgaaacggcgcgatgcacataaattaccagggtaacatatggcctcgatcataatacttcaagctcactcaccgattaccctgggtcgcaagcagatcagctacatcggaatctagatcgccggctgcaaaagccgcatagtcctcctcaccatgggagatcttgcgcctctttgcatggacatcggcagcgacatcgaagtcattgccatggttcggagaaatggtagtgggttggtcggagacggcagtcccgttgcctgactgctgcatgttggcggtgttcgtagggttccattctgagacatcgtcgtctgcctcttcggtaaaagggccgcggcgaagctgctgctttcctggttgtggggatcccactggcgtaatagcctccaccgggggaggtgtcaaagcttcgactgttgggcgggcgggtgcatcatcgtgtccgttgtattcaccagggtttgtggaggactcttcactgggcagaccgcgcataatcgcatcttcgacctcgcgcttcttggtatcggccgaggctttcttctgtgaaagctcggcgctaatggcctcttctttcgatagctctgcacgattggtctgcaggatcttctcgagcccatcgatcaaggcgcggcgcgacttgattacttcagagagagagttttctgcgttggcaagtgtcttcaagagtgaacttagacgcgcagcgtgaacgggcagtgtagccttaggagttttggggtcatgaagcttgtcgaattccgaagtagcggttgttgcggaattgtgggagttgatgacagccttgttgagagcaacctgcaacgggttgagaggctgcagttcggacggggaggatcccgaagaagtgtccttgaagaaagatcctccgagggtttgcttcttgtttgtaggacgagctttgtcgagttctgcaacatgatcagtttagatagtgcatcctcgtgtctattgattcgacctaccgtctatgcgagcttccactgcatccaaaataaccccgtcaaatacattgcgttgtctccagacctccacgactcggcggatcctttgctggtattcattcgaggagcccttgtaagcagctgacgtagcatcgacgatgatctattgttctgttagtttgagttgcgatcgtggactggcagggagacgaaccggagatagcgcaatgaggaaatcattttttccgcgtactttagattgctgggccacctctatagatatgattagcaagcggagtgcggctcatgtgtggaggacatgttgtaccattggctaggtagatcaggttgagtcgcttgggaggcggcgagtcgcggatcttttgaagccagatctgtccagtccgttcagcatggcgtctagagttacagacaaaagaattagcaagtctctttgaggctggaacaagtgtctgtacctgtggaacatgacccattgcgcaacagtaacgatgctctcctgcgtgtcattcagagccgatagctttgctttgacagcgtcatcagtgaaagccatgatgacaaaaatagtaagcacttgttttattgaacagcaagcttttgagaagtgaaattatcagatctgaagtgcaagtcgcaatcgctgttagagacaaatagacaacgagtagaaattggagaccactggagagatttggaaccgcgttgagtggcaatcaagtaaagccaccgaaataaagtcaaaggaatatcaaacgaaaatctgaactctcaacctttctcatcacaagtgaagttgacatcaagtggtttgtaccccaagcttgagacatggataagcttaccgccccggatccggcagaacaacgggcctccgagcccgcccaggccacacctgtcaacactacttcctataactatctacttcctggtcctttgatttcttctccttacgaccatcttcttgattcaaacgtctttattgagtcatacaacagtcaaatacaatccattcccagcatggctgaccgtttcccttccctagaggacttctctgagggtatgctcaacccgccttacttgctctccttacaccggagctaacatgacccgcatttaggtcaaaccgaagtagccgatatccaagccaccaccgatgacgatttccttgctcgcgagcgtgctgtgctcggtgaagacgccgagcaattcgctacttctcaagaccacgttgccgacgggaatgtaggcgcgggggatgatgacctgctcggtgcaggtgacgagcccgttgaggagattggccaatttgaatcagcattcccctctgtagcgacgcagaacctgaatgaggtacgaattggctattggatacatggtggtggacatgcagtatgctgaccaggggttacatctatgcagcgcgttgctcccggcggcacaatcactggctccggctcacccttcccccgtaccggatatcagagcgcacaggaacccgaagatgagggagatgccgttcggtgagtccaatctcaaactctggatgatggggcgcattgcctttgcgatctgcatccatcctgtctcggcccggatcccccaagctaacttctgtctttgaattctcagcgaatggcgcgaaaagcgtgattctgagattgcccgccgtgccgaggtctccgccgagaagaaggacagtactgtcaaaaaggcacaggaggatattgacgacttctacgtttcctacaacaataaggccgataagaaccgctcccacgcccgcgccgaggccgaacagttcctcgccaaccgggaggacacctccgccggaggcaccagctgggagcgcattgctaagctggttgatgtatcgggcaagggctccgcgggcggtgccagcggctccggaaaggagcgtttccgtgaattgttgatcgacctccgaaaagaccaggaggctcctggctccagcggaatctaggtggtttgctttggcgtgtgggggatagaagattcgggggtccggggttaagacatggttcacaagtttcccacatttactcatctgatatggctttttctacatccccctccccgcattatttggtagccttgccgtgatttgggcgctacgtctcttattctctttttattttattttactccacgcagcgaagtctctaggggggtttgtaaattagtatctcgctgaaattgatagcatcgttaataccacagatttcattctccggccgattcgtgccgagtagatatctttattacacgcttaatagtacaatacggatgtacaccaatcatggaaatagttggacaaccagttctcggatcaagagaaataaatgcatacttaattcatatcatcgtcgcttttgaagcatccttagtcaagctcggtaatatcaccaccgggctcaccaacttcctgctttccctcttcttccaactccttcagtttcttctggccctctgctgtcgtggcgtcgacgattccttcctccaagctgagcatgccgccattgcccaattgctccacaacgacctctgcctcctcgacagacatcttgccgagaaccttgttgacttcgtccaaggactcggttgccagtgccttttgcaggtcttcagggaaagcgtcgaagatcttgcgtacctcaatctcagttggatcttcgctattagcggcaggaatgttgatagtgatcttggtgttggggtcaacagcgtgcagctggatttgctctacgcccgcaggatcgttggatgctgagccatccttgctgagttcagcggagcgggatttgatacgagcgtaagtatcattgacatcattaaggaatagggtggatgcgcggtgatccttggtggtgatgctagaagttcatatgttagccattgaccggggaaaaaaaatagctaggaggttgatataccgagtgaagaacagctggatgccgtcacgaccgagcgagcggcagtattgcagaagtagaccttggtgcacgcactggcgagcataggcgtcttgacccttgagctgactgttgaatgcctcaacaagtagtccgtcggtctctttctcggcgacaatttcggggttcgctgagatgaactgaagacaggccttgtagtctccaggcttgagctgagcgaacttctttgcaagcggactaatctcgatatcggcaggatcatcatcgtcgccttcatcgtcagccttggcggcggagcttcccgcaccagggttcaggagctcaacagagctctcctttggtttggcagccgccttcttcttttcatcagccttggccacatgtgattggttgaaaccttcgtgtagctgatcactggtgatcttagcgccttcctccttctcaagttgcgcaagctttgcaaacaattccttttggagtccttgaatcttttctaagtgtccattcacaccctgaatgtatgccttgaagagattgtcaggcttagaatcaccaatttccttcttcacctgatccaccagtgagctcatcatctgggaaaatttgggctgttccggttcgtgtgtgtatactccctccggcggggtgggggcctggtcttcggcggggttgcttgcgaactccataattgttgtgaaaatgaactcatcaggggaagcagacgagtcctcatgcttcttgagagactcaagaagcttatcgatgcgtgacagcaatccatcattgataatgcgctcgtacttcagggttttgatttcatggcgacgttgctctcgttgctggtgaatctgggcctgctttgctcggatgaaagaacgtttatcgacattgggatgaacttcgacatccgaatcatctgacagctccaaggcgtcccatttgctataatcaagaaccatcttgtctgacagtgaatgtgtagagtaggtatgaggtggggtggtgggtgtattagcggcagaggaaataggtgagagacaatgtttctgatcttgacgtgaatagcaacaatttgaccaatatgttttcgaagtgatttattcttatgaaaatcaaaataaatgaagctctagcgcccgagcagatgaagtatccagagctctcgacgggcttctatgggcggtagataaaggcaaaatcacaagcggtcaaatagggcagaatcagccccgaaaaccgcttttccggtggccgtgggtgtccggcgaagctctagacacatccgttcatccatcgcacgttccaaggagctgaatgtgtgccatgtgatgtactcaacttgaacatattccgactagatatggcaggtcgacgtcttattcggtgacatcattgtaactctattccgtttcgatccaactccgatccaactccgagatgcgcggtgccaggctgccggtctctctggccttgggcgttagcccacggcaggctttgagaccatatagctcctttgcttgcgatctacttcccaaaacaagatcgtctcttatctcttccggagaccacaatgggttgaaccgtctcaattcaaccgcctcgggtacactccgggatggtgccaacccactattgcttcaaaatatcagcttcagatataccgcctctacatctcgcattgtctcacaagcacgctttctatgttcgacttctcaacttcgccaagcgaaaccacccgcaacctccatagagccaactactcggtcagctacagaaccgaaagaggaggaggaggacaaggggtttgaactatctgagcgagcagcgcaggcagcgcaggtcaacatgagcgctagactggccaaggaaggcgcagcgggaaagaagtccggggtttcagaaatctggcggcttttgaagatcgcgcgccccgaatccaaggccctcggttttgccttctttttcctcctaatctcctcgtcaatcacaatggcagttcccttctccattggtaaaattatggactctgcgaccaaaggtgtaaccgaaggaggtagcgaattgttcggcttgagtatgcccatgttttacaccgctctcggtggaatcctacttattggggctggtgcaaactatgggcgcatcatcattcttcgaattgttggcgagcgaattgttgccaggctacgctccaagcttttccgtcaaactttcgttcaggatgccgagttcttcgatgctaaccgggttggtgatctgatatcgcgccttagctccgacactatcattgttggcaagagtatcacgcagaacttgtccgatggtctacgagctgctgttagcggtgctgctgggttcagtctgatggcctatactagtgcaaagctgtccatgatcttgctcgtcttgcttcctccaatcggtctcggggctctcttttacggtcgagctatcaggaacctcagtcgtaaaattcaaaagaacttgggatcgttgactaagattgcggaagagcgtctgggcaatgtcaagactagtcagtcgtttgccggtgaagttatcgaagtccgccggtacaacaaacaagtccgcaagatcttcgagcttggtaaaaaagagtctttgattagtgcaaccttcttcagctcggtgggtcggcagtcttgattcttttgcgctttgcgactttgactgacttcttactagactggtttgatgggaaatatgaccattttgaccctgctatatgttggcagtgggatggttcagtcaggtgctatcagcattggagaattgacttcgtttttgatgtacactgcctatgcaggctccagcatgttcggtctctccagcttctattcggagctgatgaagggtgtgggtgcggcgagtcgactctttgagctgcaagatcgtcagcccacgatccacccaaccaagggtatgaaggttgaaaccgcgcgtggacccatccggtttgagcatgtcacgttctgctaccctacccgtcccgctgtgaagatctttcaagatttgaacttcgaaatccctcaaggaactaacgttgcgatcgttggaccatctggtggaggcaaatccactattgcgtcaattttgctccggttctatagccccaccaagggcagggtcttgatcaacgggaaagatatcatgggaatgaacgccaagtcccttcgcagaaagattggcgtggtttcccaggagcctgtacttttctctggaacaatcgccgacaacatctcctacggcatgcctcgagcaacacgctcagagatcattgctgctgcacgcaaggctaactgtcaattcatcagcgacttcgtaagtccacccagcagctattatttttatgatcctaggctaacctaatgcagcctgatggacttgatactcacgttggggctcgtggagctcagttatctggtggtcagaagcagcggattgccattgcgcgtgcccttatcaaggagcctgatattctaattctggatgaagccacttccgccctcgacgctgaatccgagaccctcgttaacagtgcgttggccgctctgcttagcggtaacaacactacaattagcattgcccatcgcctttccaccatcaagcgctccgacactatcattgtcctaggccccgacggcagggtcgccgagcaaggctcctacgagcagctcagttctcgcccggatggcgcctttacgaagcttatggaatggcaaatgagtggtggcgaaacaacgtcaccttcgggcaagccgactgaggccgatgagccctggaagctccagacggagtcagaacctgatctggaggaagatgatgtagaagaggtagaagagacagcctcttcgaaaaaggaataatcgtactccacacctcgttcactcctcctattcctacactacatctcactatgatgtctgctcattcttgtagatttcttttttctttgtcaaaatacatgttctcatctacactcacctgtcacggttctcacgtcctcccttctccacctacacattctccctgttagactttgcgatagatactatgtaattacagtgtacaaagatcaatattattgttcgaattctacttttttttcggttcggtttctgtcgcctctgttctggcatgtcatggaaaaaaaaaagaaaggttatactgaaggacatgtgtgtaccggataatgcctaacatcagaacttcgagatcgccgtccggagtccggtgcgggtccagcgacatatcttgcttagtaaccagtcatatgcggacgacctcgacagcgcattacagctccttgatatgagataatccccttttttgtacagaatcttttgcttatacataagaagtagtggttgaaatacagccatgaaccgcatacgtagtctcatcgcccgcccagcggcatatgagcgactacaggactccgccgcagacgacgccgatgagacaacatacacgcagcgacagcagcaatctcccttttcaagagtacattatggcatattcttcctcctcggggtgtctatgctgtgggcgtggtaagcggaacttaacagtctccgaacccggaggaaacaagccacatacatgtgtgttgggccgaccatgaagctaacgcagagcatgatctaggaacatgttccttgccgctgcaccatatttctacagccggtttcagtcggacgactggacaaggctacactatcaaccgtcgattcagtccatgtcaaccgtcaccaacctcggagccgcctttaccctagcaaagctacagaagaacgcgtcctatccacagcggataacgttttcgctgttgctgaactctgtggtcttcgctattttggccttttcggcagttgtcatgaccgattcctcgccgcgagcgtactttggtttcctgatggtgatggtgtgcgccgcgagtctagccactggtatcaaccagaatggcgtatttgcgtatgtctccgggtttgggagggatgaatatacccaggctatcatgagtggacagggtgttgctggtgtgctgccttgcattgttcagatcttctctgtgttggctgtgcccccgaaggaggatagcggccgagaccaagagcaagaccccagcatgcctcagacgagtgcgtcgacgtcggcgtttatttatttccttacgtctacgggtgtctcggccattgctttgctggccttcctctatcttttgaggcaacaaccttcttcaagacaaaagttgacaagagatgacgatgagtctattacggatgaccgtgaaaattccaagactgtcagcctctggactttgttcgtcaagctacggtttctggcgtttgctgttttcgtctgctttctggtctccatggtattcccagtttacacggcggaaatcaggtcagtcaacgatcctgctagttcacggatctacgatcctagtgtctttgttcccttggcatttttgctctggaacctaggcgacttgaccgggagaatgtgtgtggctattccaggagtgtcattgggacaacatcctcaggtggctgccatggtggccattgggcgtgtcattttcattcccatgtaccagctctgcaacatcaacggccaaggcgctgccgttaagagtgacattttctatttccttatacagttcttctttggtgcaacaaatgggtacctgggcacaagctgtatgatgggcgctagtcactgggttgttgccgatgaaaggccggctgctggtggatttatgagcatggttctcgtcggtggattggctgctggaagcttgttgagtttctctgtcgccagtggttgatttcggtgccgtataacttgtgttcatcttctagacacaaatatcacgaatgacgaaccatgaaaatacttctatcctttggtctcagcataagcatttgtttgctaggtgacccattgagcccttgagccctttaatgtagcccctgttttccgtttgataggagccctaagttgagacccaaggcgaagtttgccggctgtcgccttcatgttttcaatcactcttaaacacgccagtcatttcggactttaagcgatctcctaaaagcaatcactcaccatctcacatctcctagtcaactcctattacaagccgcttgtcgtctgatcttctgtttgcccgcgcgcttcctcggcgtcttgtccttcaccctctcttctcttctcttccctttttccctccacaccgttccctcttttgatatttgtctttcctttcgggtgtccatcagtaagagaaacatcctggatgtctttgattgtataacttacagtctctagttgttgttcatgatgattttcgtttcattggctatgggcggctggtgccatgccctagctgtcccttcattctggagtctactgagtggactccttgtcttggtgagtactgacatacaaaaccaggtatttaaggtgtggtgtgtctcatttcaatcaattatcacagtttttcatttactatgtgacctggatcatctacactctctgcttccactccctgagtggctaccctggacccaagctggctgccatcactcctttggttcatctcgtctgggacatccagggcaagcagcactcaaccgtgaagcgtctccatgacaagtacggagacgtggtccgcattgccccgaatgccctcgtttaccgtgctgcacccgcttggaaggacatctacggtcaccgcaagaagggacataaggtcttcatcaaggatcccgccttgtatgcacccactcccaacggtgtcaatgcaatcatcaccgccaatgaggacaaccactcccggatgcgccgtttgctgacccatgcgttttccaacaaagccctgcgcgagcaggaaggcatcctccagatgtacgccagcatgttcatagaaaagcttatgggtctcatgggcagtgctgaatcccaggacattgacatcacctgctggttcaacttcaccaccttcgacctgattggcgacctcgcatttggagaacccttcggctgcttgtcaaccagcgaataccactggtgggttcggattattctggatgctgtcaaggcaagtgcctacctcaaggtgttttggttctaccctttcctcattcccttggtccgcgtcctggttcccaagcaccttcttgagaagcgccaagccagcttcgacctgagcgttgagaaggtccgtcgtcgtcttgccctaggtgccactcgccccgacttcacttcatacatcctcaagcataccaaggatggaaagggaatgtcgcctgaggagatggatgcaaactcggcggtctttgttctggccggcagtgagactacggctgccctgctttcaggtgtgacatactaccttctgcgctgccgtgacaagtacgagcgtttggtcaaggaaattcgtggtgcttttgacaaagacggtgacatcaagctatctaccctcgtggatctcccgtacctgaacgctgtcctgactgaggcaatgcgcatctacccgcctattccttcgatgcttccgcgaattgttcccgaaggaggcgccatgattaacaagaaatatgtccctggaaatgtgagtacagtatgccggtaccggtgtaatgtggtgttttgtggaaatgtactaagtgcatggacacaacacaacaaatccaatttcttagatttctcaatactaacaacaagtaaatacaaacaggtctccgtctctatgtcgctttactccgccttccatgcagctgagcacttcaagaatcccgaggcattcgtcccagagcgctggttgaacgagtctgacgagtacgccaacgacaagaaggaagccttccagccctactcctacggtccacgcaactgtctcggtcaacagtaagcatccattcccttactatctactcactccatccgtgttttcccctcagtcgtgcctaacagtgtttgctaacattttaactacagcctcgcgaacgccgaaatgcgcctgctgctcgccaagctcttgtggaacttcgacctggagcttctttctaagtctcttgactggactgaccagaagaccttcgcgctctggagccgccccgagttgatggtcaagctcttccgtgccggtgctggttctgcactctaaattcacgaattcatgagacaattacgagatctccttttaacagctcatcctgttgtgttgttgtctcaaccgtgaaaaagcattgggccgaaaagcgtttgtcgaaaatctagcaatggcgttttcttcttttgtctcggggttgcggctgggctgtttgtttcgtcctccctgggattgtcagtacataacatatgtacctagtcatctgtgggctactcccccggtacaaaagattggaggcatttgaaagtgggctttcgctagaatagaaaaatcaaaatcaaaatacagtcttctgtcatggtatggtcacttggccggaaaccgctagacagtttattatggctgttcaaaaatcgtatttgattattctcacttttgaggcaaagcaatatattttgcatgcaatatagaatatgaagatattgtatatgcaaatcccttgtactggtgaggcaatgcgccttttatctaaataactagccccaagcccacaatatgtgaacaaatgataactcctaaccatgcaaattacaaagtccatgtaactcccaggcaatgctttttcgtatactaaggaatcatcagaaaaagtcctgttcactcagccatcgcgagtccatcgcgtaggccaccaaatccgcagcgcaacacatgtcttcgtgtccatgctccaagtcgaggagctcaaggacggcttttagtctgccctctagtgcttgcttcagccgcgagatactagcttgcacgtctttggactgtctttccttgagggacccggccatgttttggtctttccctttggatgtctccggttttggtgtcattctgttgggcgaacaaggcgcaagagcctttcgctgtggctgtacaaacaatgcttcaggcttgcgatttttgaaaagactctgaagcaggaagagtagccacaccaagttggtgcgtggagagtattctgcccagatgccaggaatatccgctaccttttctgtttctatagggcaaccagtatagagtgttgcgcgcatactgaattttaagttagcaagttggtaaagaaagcaaatcagcggagatagggtaacatactatcggtaggtgtttcgttgcataatctcgtcttcatcttggccaatagcatcgaacaattgcttcttgtccagatcagatgatgcaacctcagtgagaccagcggggtcatcggtcaggagtagatccgctcgagagagcgagtagtcaataatggtagtctcaagggagctgattccaaacccactgcaggatgactgtcgtgcaacatcaaattctgtggggggatccaagcaaccatcttcccgcgtagaacgtatacaaacatttcctaaatgaagatctcgatgttcgaacatagcatactcctctgcccgggccagagccatggcaactccccagaagatatcatagatttggaaaatcgatgaccaagcgaacttctcgagttcacatcccgcatcgtccatctccacgattgcccatagctgcgtatccggataagctcttttgttggatggattgggatttaggcagtcatctttggttttcttatagtggtcccatgcattttggaacgactctgggaaacgaccttgaacaacatgaatctctctaaagcgagcaaagccagggatcgggtccaaatatttgagcattttgacctcggaaacaatctcgtcgatggtggtgaattttttggatcctggaccgctctttgctcgcagaggcacgaccttgaagactccatcgccatatgatttcagtttagccaactttgacttggacaccaccggcctgcaagcttcttcccgcaggtgaagcttgtaaacttcaccgtaggatccctctgcgagttttgcgacgtggaacatgttcgctgatcgtgaggcccacgagctgaacttctgaatgccttgggcggcaatcggagatagtgcctcattcagaattgggctaacataatcactggccttgctgtcgtgaacaactccagatgaccgtcttggtgcaggaatcttttttctttccgctcttcttctggaggatgtacttggcttttctcgatcctcgcttgtggactctggcatcatagctggggaatctgggatggcttgaggaagtattcctggattcttcgggcatatcctgacctccaccatcgtttcgcatttcttcggttctagcttcgactgctccgagaaggattcgaaggaggatcgcggtgtcagggtgtccgaggtatcctctatcgtagacggactcgattcacccaagggaatttccgtcaactcttgctcttgctcgctctcagttttgataggctttgtgtaattgtcttgttgaagggttgagtcgtcatcgattgccacttgggctagtttcgcttggaggctttccacggggtcgagatattgggtcttggatctggtatctctagcagggcttccatgatcaaatactgccctaggggcattggctcttcgtttcccgtacactctgcgctgagctacggatttgggtttggattgtttgggttccattggtgtcgcgtgactcgagactggcgagtgtgaccgggttgacattgtcgaggaatatttatacactcagtatactagccctgatatgtggaatatccgtgtaagggggttaggatgattctgttcgacaggaagcggtcgaaagagacgatttgggccagaagtgatggatcgtgttgatgtttaacctaatcgggattagcgtatggttactgcggtgaaaacattctgcccttggcctctgggcttttattgtactgttttacggagtatacggggaagggagtgcttcaattgatgttgctttggtttacagactattgagtgcaagaaagctttatgtgattgtgtttgaacagaaatagttggcttatgttcagtaacaaggcagaagtccggggaaagggtatacttctccaaccctgcctcattttatacaagggataaaattcttattttcatttcattgctctgtccctgagacctgcactttctctcggagtcttctttcccttacatcgtacatgaaacgaacgtgggactcatactttaagatctgcatccccgtggctgtttctgtacgctggctgcactgcgtatagtatgacaccttcagaaacatcccgtgtttcccccccctttctccagattccgggcaacacggtcataagagagccgatagtccaagagtctagatacgtgcagcccgaataccgtggacggtgaatggcccaatatcatccacagtggacatgacgccggggctgaccggaagtggtccctgagaagtcacactgtgacgtaccgcccttgtagtatccggtcgaaggaatatagcataaacgcgaaaaagaaacccaaaaaaagataagaatacttagaatgatacatccaattaaaaacgaactgaatagtgaaacaaaataagcttaatgaagaaaacaataacagaaaagtccttaagtgacccggaagcacgcgcctcgggtgctttgccttttttttctgctttttcgttttccgcctcccgccctccctctctcttctctttgagacttcatccaatgtccttctaacactttttaatcctttctcgatgcttgggcatggcgttcaacttcaactggtcgcctttgatggcggacgcgagtttttatactcgcgcccaagatctgcttactgccgcacttaacaaatcgccaaaaccccccataattgtcgatgatattcacgtcaccgagttgaacttgggatccatcccccccgagctcgagattttggaaattggggatttggccgaagaccgctttcgaggcatcttcaaaatgtcctatactggtgatgcctttctcaccttgaagacccgcgttcaggcgaatccgctcaataccttcctgctcacacgaccaacttttggctcgccagtacctcttgctgcagcgtaagtctatggtcccacttatctcttatttgactccaatctattagatgtgtttgctgactgtcgtgattttagtaccccgctcaccatacctctacaaatcaccctctccgacttcaaactttctggattcgtcatactcgttttctcaaaacaaaaaggaattacagtcgtgttccgcaatgatccccttgagtcactcaaggtttcgtcgaccttcgattcgatcccatttgtgcgcgacttcctacaaaaagaaatcgaagcccagcttcggatattgttcatggacgagcttccagccatcattcatcgactgtcgctccgtatatgggttccggaatatcgcacaggggaggaaatgaacgacgagaccgataacacagccaagtcaagaagcgaaggccctggccaagatcctctggctagcccgccacaggatcccgtcgactcactcggaaatgcattgaatgaatccgaaatcgcatcgctctctctagattcatcggtcgagactcactcgcttttctcacaaaagaacctccttcgcttggccgctctgacagattcgcaacgtacactgtctttgttcactccttcgatcgaggaagtggtgtaccgagcatggacttctccaatcgatcccagcgaattttcctcgagcgtgatctcaccactgagcccgaccctttcacgaacgcattcccaaatgggaagcatgtcttcccttcatgaaaccgccagcactgtctccatgcaaagtcgaccctctatgtctggccattctttcagtactagtacctatggtctgagtctaggcgctggacgtcattccaaagcccacgcccggaagcgcaagaagcgtgttgtggacctgcgccgccccaagacaactgatgacgctatgagcgtcggcgatgaaagcgtcatgaccgagtcctccagaacgccttctatcgcctctgcgcctctgcccgttgtaaatgagccgtcagatgacccagtcacaccacctctatcacccgaagccgactcccatttgcccattatcccagaaaggcatttgtccaacttctcccgccccacacgtcgggatggagacttatcatactcccatgagactatccgtggacccaaagcagaggacgtgcatgccacccctcatgctactgtgcgtggctatcccaatgagaaggccacaccggggccgtctagcaatcaacggaccccgttgcctacgacattcaaagacgagaatgccaacaacgaaagcgtcgattccgtcctggttgagagactcgccggtgaaatcgctcgtcgaatgcgcgaggacaagcttatgacaaatgcatgcagcggcttctggagtcgccagcgtgaagacagccctcccccagcgtacggccactgagcactcacctccatatatcttctacactcgagcaaccctcgagcatgaccgttacgatttccttacttctccttattttgtcttaccgtttcttggttgttcttttgttcttccttttttggggcttaactgatatttctttggagcgggagtgtacaaaattgggtcctgtcatggtacagctggcgtcgagttctgttcggggtttcatttttacatgataccacactcattagccattgtttttttatgtatttcttatttttaggcaggtcatggggtacctagagcagatgagatggatattgggggtctaaattatatgaaatatgtttgttcccaattgctccaatcgctccaatcgcctaaatcgcctaaatacctccgatgcgatgcgggtaaaaaagctggagacagcgctagaccgggaggaacttagctccgcaccgggcaccgtgcaccggacatctctcgattccttcccactcctttcccttccatccatatcacaccaattccaatatggcgggcatgttcaagaacgtgtttggctcccatgaggctaagcccgatgatggtatgttaattgatacatctcaatttctgagctaactctggtagacttcgccgacttcgtggaagctcccaacccgtcgcctgcctccctcgtcgccgactcgactgtcgttccagctgccaacacactggccgccaaggccgtcccctatacagcctggtaccgggtatgggagaggacatccccgagcgatttcaagcaggaggcgatgattatgccctttatcctcttgattgtcctcttccacctttggggagtgcgcaagaaccgaaggagggcgagggactgggcgcaggcccacgtaccttctcttcagaaggagtttgccgtcgtcggattcgatggaatcgcccgaccggctgccgtggacgggatcaccgtggagctcgccaaccccgagtcgctgctgaaggagaagaccgcctccgagttcgccgcgtatgcgactggccgccaaaacgttgccttcctcgacgtcaacatcaagatgcccaagcgatacaaccccatcaccttcgtcatggagtatgtcttgggcttcttctttgagagctgggagccccccgttgagaaatacgaggctctgctgtatgctttcgatggcaaagaaaaggacctggttcccgttatcgctaaggatgcttcccctgttaagctgcctagctcgacttacgacggcttcatctgggctgttgtccacaagagccatatgcgcaagttccgcaatgaccgctacgatgcctctatcactttctccaaggataatcctaagctcccctcgtgggttaccgtgatgactgagagtgccgagattagcgatactctcctcaccccggagttgatccaggccattgagcaggctggtaatgactttgagttcttgatcgtgacggaccagcctgtcgacagaccgaccaagtaagtagcatcagtgcgaggcttaaatcggattcgttactaaccaatgtgtgttcctaggatcgaggagaccgtccccaagaagcgcatccagctctccgccaacctcgcctcctctgcatcaggctacgcctccaccctccctctgttcaatcaattcctacgcttatctgacaagctggtcgcctccgcccatttccgtggcgaagtcatgcgcaaggtccgtaacgtccgcgaagaagagatcaagaagctgcgacgtgtcgacgaagaagagaaggctgaggagcgccgcattgccgccgagaagttgaagaaggatgagcgtgagcgcatcctacgtggaatgagcgccgaggagcagcgcaagttccttgaccgcgaggctcaaaagggacagaggcgccaggcgaagaagagcacccggaagggctagatgggtgtctttcgctttggaggatttctattctgtcttctcgctcctttctgtgggaaaggtgcgggttgaatgtcttatcctgcccttttgataccttttttaatttgatgtattcatatttatttgtggaagatatgatatctaccatgagagtgggatgcaatcttcatacgttcaactatattcaatgcagattttatattcagatcattgaggcctgtgtctgatttgaattccagggaagtaacgaagtagatggcgttactgccgtacatctcgtcaatcccaacatcccaacctcaccccatcactccaatccagcatcaacagtcattccaattactcggttatccttatatactctgacctgtttcaatcattcatcacaatgcatttccttgcatttccaatctcattgctcctttcagctattaccctatcccaagccgctcccacagggaacagtatcaacgccagcacaaccaccaataccacccagctcaacgcttccagattaccatccggagccattatcacccgctgtaccatcccggacacaatcgccctcactttcgacgatggcccgtacatctacacatcccagatactagataccctcgcccaacgcggcgcaagggcaaccttcttcctcaacggccataacaggggaaacatcgatgcatcacccgagatagtgcagcgtgcattggcagaaggacaccagttgggatctcatacgttcgtttataccacccactggcttactctctcttccccagcccagccagtccaagccccaacatacacttaccaaataaccgtccagatggaaccacgcctccctcgatatcctctcatacgaagaaatcgtataccaaatgacaatcctcgaagaagccttcacacgcatcctaggcttcttcccgacctacatgcgccccccgttcctcagacacacgcccgtcgttctcggcgctatggccgatctgggataccatgtcattggggctagtgttgatacaaaggactatgagaatgataatcctgatacgaattgggttagctttgaaaagttcaagagggaggttgatgctggtggcaccattgtgttggcccatgattcgcatcagcatacggttgagattttggtggataatatgcttgcggatgttcagagaagggggttgagacgtaagttttctttttcctttgtgtttgtcggtggttatggggtgaggctaacgggtttctcttatagctgttcctgttggcgagtgtcttggtgatccgtctgagttttggtatcgtgctgggaggtagatggtcaaggttggtgggggtgtgttttatctcgtggttggtcttggttggtcttggtaattgttctttttcgtctttgtgctggggtcaaaggggtgtctgtgtatagaactcctaggtttcattgaacttctgcgttattctttgttcttgacgaagacgttctatatatatgcgcactcagtcaatttaatccaggttatcagcctggacagcctattttcatataataccagtgtctactgtcatcgtaggattagcacgcggtcatcaacacaatccggagaagtgaccatctagtatataattgattcgcttcgctccgcaatgaaatgcaaagattgtgggtactgttggtatttgtattgacacagtgagattgctcacatgcagcttgtcagacatttgtttgcccatttgtggtcctttatggattccaggcctttatacccttgtccccatgacgctatttaaaaaacatcatggtactactaagtctatcatcagcaatatatcttcttctggtcgcacttcttggtcacttaactatatatcatcgtctgtcgagttatatcatgccgagtgtcaagctcatatcatgttcgagccatttctctctctctcgcagacaacattatattacttggcacttgctacccactgtgccctttgatgagagtgtctaaggcactcagacacgtgtgagtggcttctaccattcttcttttgaactgtacataatctgacttgctcaggatgcacacagatcgacaacccatagacctcgagagtacaatcccaaccgtcgatggtatgactcttttctttatatgtggagatcggtatacgttgaggaactaattctgtctgtttagaaatatagcaacggcatcccaaaattcagagcatccaattctcagaaggctatgtcgcgtataagttgcaatttctcactcatctcatcgttcgaccccaactccgataaatttgggttggaagcgcaaatagtcagagccccaagtcttccaggtcgtacattatttgactttgatgccagtatcgccttgctcctcccacatattctgaattcgttcatccccagaattgaggctgtgggccaggttcttggggcagtcctcagggcgagcgtgaacactcgctttgctgatttcaagtcgaccagcactggctatatatacagacaccgcatgttgtatactgttgcgtggtgtcccggttatcctagaagccgtgggtgaactgaaagtcccatggattggggcacacttggtgaaagagccatttgaaaacgaacgaggtttcggtcgtgcgattggacaagtggtcgagtatatgattgatcaaggaacactctatatatttcactccacttacgatgagaccagctcttacgccaagtccaggtgaacagagtttggagagtggtgtactggtctattatcgaaaataataacaaaactggagtttcagccaagtcatcgctagtagtagggcaccctgttcgaacccccactctaattcgatctatataaaaagtctatactccaattcctgccccatctatatctacatagaacctataacttcccaaaaatcttcaccctctcctcaacaggcttctgtaccttctctccagcagcagcttcagggctgccaaagactagctgcgcaacatttcgccactcgttgggcagaccccactgcttcgcagtagcagcgtcaatgagcgggctatagtgctgcaggtttgcaccgaagccgagtgcttcaagacctgtccagactggtaatcgttagaatgggggaagaagtgaaacgaagaaagaaaagagtaaacatacggaagtattgatgcatagcattggagtggtccgcccacggcaggaaattatccttgtatgcagggaatttctcctgcatgggtttgatgtgtgctgggtcttcatagaagaggatctggatattgattagctatggacaggactaaagatctcgagttccaggagacccaaaactaaaagctcattacgtaccgttccatacgcccccttgaaaccaagcaacttgggcaacgtctgcttttcccaaatctcctgtgggattttacccgtcttaacaagaccctcgaaaacctcgatggcgatatcccacagtctatcgtgatgatcgtgcaggagtacgactagccgcgtagactgggtattgaacgcactggggacatgcaagatggcggcattgacaagctcttcgatcttagaatctgagactggacttttcttgccgagcttatagatcgtgcgcctgttcttggcgagatcgatcaaagcgctagacatgtttgttgctgggggtggggcttgcttgtaggttgaggaggagaatgagcggggtgtttgtgtttggggttgacagttggatacaaggcgtgttgtcctggttctgaataatgctgcgcgggttatggcgagtaggggggattgagtgaagcgagtggtcattttgggggttcggatgtgttgtatatattgtgttttgtggatgtctgtcttttatatatgttcacacagacttgtggactcttgcttaccactcaattgctaatccgggggactcggtacgcttgtacccggtactccgtaggggcaatttccgccggccatcgtgatatcgcggatttacggatttacggattcaactatttatagataactaagcagttggcttagtcagcagtttcaaggccttgacccaaacccctcaggttggctcgtgcagaagtctaattactaatatcccgaagaagccccacttcgcgataagcgttgaatcctcagtcattcttcatacaatatacatattcttccctctaacatccatacatcacaaaatggaccccaaagtcggagtcggcgtttttgttctcaatgctgcaggcaaattcctgatcggtaagcgaaaggggagccttggcgctggtacgtgcatccaatagaatactatacatgcaatagacctcaattataatcaaagcttaccatttgtgattaaaggcacatggggactaccaggtggacaccttgattttggtgaatcttttgagacttgcgcggtccgtgagactctcgaagaaacaggtctgaagattcaggatgtgcggttcctgacggccacgaattcaatcttgaaagcggagaataagcactacattaccattttcatgggtgctgtctgtgaggatggtgctgaaccccaggtaggttgattgaggtttgttttatgtgtttatgtgtttttctgtttttatatacccccgtctcgtggctgcgtacactgcaggaacagaaccaggatacgcggcttacttcttggtaggtaattgagccggataggtgcgaggggtgggaatggatctcgtgggatgaattgcgggcgtatggggaggagcaaatcaaggctggtgacgggttcgagggaagaaggttcttttcgcctcttttgggattatttgaacaacgtccggattttcgagtttgaatattcagcacataggccgaaattgcaattaaacaaacgctctgtgtaaattatggatatctgataacccggatgctgtaaccaaagcctcatgattcattctctcaccctgatccttccaatggagacaaccttgaagctttgttaagatccaagtcaaactaaggaacatgcgagccagaattttcatcagcagtccgctgaatcctcactcgcatgacaaaactcgaaaagtatgatcgcactgcctcttgtagccatagtgggaaggccctcagcgacccaatcaccgaggaatgtctaggcaggacggttagcccacttttccgattaacaaggtgctccaccactgcctgcgagacgtcctttggatctaggagtggttgatcgaaagcagcttgatatttagtgaagccttcgatcatgggagtctgaacccaaagggggtgaatggtactaggtgtggtcagcataatttctctttgaataagactttgccagacaaacctcgtccgcacattcggagctttgtaccaatatttcaactcttgccgaaggccttcctggaaagaaagagcggcagccttagaacaagcatagtccaccatctcgccgagagtaacaaagctcgcaacgctcgctactgtaagaacatggccgcggttcatacgtatcatgaacggaaggaattcttttatgatgaggaaatgggagatgatgttgacatcgaatgcctgacgcaattgctcctctggcaaatctagaatggtatcatgatggaaaatagcagcattgttcacaataacagttggctctccgtgtgcctttcgaatagcagcgccggcttcggaaagagatttggccgatgtcacatctgtttgatagaatgtgacgttttctggaagctcaaaggtaggccggatgatatcgaggaccacaacgcgtactttattgcgagaaagatcttccattatttctctgccgatgccaccactgccaccagtcaagagaaccagctcattctctgggatccatgcctcgctgccttggaagttgtttatcactcgctctgagatctttgtgttgaggtagtaaagacctacagagccaactaacacactcagcgaagatttgatgatcggtgtatccaagagattaaacatggtgtcaagggagagttccgatagtcacacacaaagtctgagtagtcctgtaaaggtccaagaatgagaaaaaaatgaaagtcaatctcgggcaatttggattctgcagctgacccatttatattggaggaggggaaagggcggctattttaacccaagatcagcagcaatttctgcgcttgtgttgcacaggcctttggttcccgagtgtggctggctgacttttttagccaacccgagtagaaaaggagcatttcgctgcgaataccgaggttatcatcgcttcttcgaggcacatgttcatgaacagggtctaaaataacgaagatccgatgcaacacggagtcaaagggggaaagatccttgcattccaagctatgagtaaagaagaaggacgaatacatgatcttatcatgccccacagggctgataaacttcaatggctctcgtgttctgcggcctattgtactggacttgaaatcgtggccaacaaatgatattctattatgagagccacttgaggcgtctcggtaccactcctaaacgaactagatcttacggttgagataatttgcaaagataacagacactacgacattggcctgtttagagtgaaggtcgtcggcctcgtggaaagaatttggaagccttgcctcaggtcctgtttgattttcgagactagacgggttcgctttccagattgtatttcagatgtaagaacgagagagccatggtagccataatggatagtgagtatgtgtatatcaggaagattcacaagtgaggattcactcttttataccatacagcaaagcaacggaatttgagagaatcttgggctatagtgaatttgatagagaaccagcttctcaaatacctgccaagctcaacacaggaactggaaacaccttggcatttgcttgatttccctgctttatacttggaagagtgaagaacaaggagcttaatcaactcgagccaaaaacccagtcagatactataacagcgatagtcacaacctgtacaaatatcagtcaatctatacaccaagagccctgaagattcgaatacgcaccaatgaaatatctactccaggcattataatgacatccatagcaggtcgatacccctgtctagagcctctcatcaaagccagtttctcattatgacgaatactctcccgaatttcagcaaccttcccatccccatcaacgacatcaaaaagcgccagcgcattcccatgccgttcaatattcagagtaagcattttctcatccccgcgctttccctcaaacgcagccgcattttcgaacgaaagagcaaaattcccaaacgaagtattgcccaacgtccatcgcggagtgccagtagctatcgtcgcagtatcacagcctggcaagctaatcgaccaactattcgtccacgacaatttccggtgtagctcgaagagcggcagacccgatttatcgcgaaactcccgacacgagcgatcggtgtacttgcgaccagtcaccgtgaactgtggtgttccatcctcttcggtgatcttatatgcgacggcggattgggggctgccaaatggtctgagcacgagggttgtctttgagcgcgctatgtattggttccggaaggcgatatcgcggtctggcgatcgaaggggtttgcggggcttagaggagtatgagcgcgatagtcgagcgtcagagtaggaggtgtaggacatggttggtatgccgtgtttaatcgcaagacggacgcgctgggattatgcggggcacctctttatactagggttgggttgcattggtgtatcttgcgctacttatccctgttgcggcatttacttcggcgaatgcccgatgatctcactgattgctgagccaccggatgccaagaaacatacatgaagctattcccctcggggcttcagcggggtaagtggaatgatgatttgtggctacatccggtttcgaacgacgcatttatacctagccacctcttatacccctctcagagaccaatgctccaaaatttagaaactctgccatcccatataaaaagcaacatcggatgtactgccccggtgggggcctatatctgctgagtcatgttccacggcctccggtccagggctgtctgttaggcaaccagctaagtatcaaccacctgagtatcatcacgatcgatactgttatacaaacatggggaaattcaccgtcaaatctctagaccacctggtccttacagtccatagcattcccaaaaccgtggcattctatacaacatatctcggcatgcggcatgagacctttacctcaccaactaaccaatccgttcagaggtaacccctcttttctttacaatcttagtggatgttcagaggcattgacgataatagacatgccctcatctttggctctcagaaaataaatctccaccaatcgggcaaggaattcgaacccaaggcccaagatgtaatgccgggaagtgccgatctgtgcttcttgaccgatgagaatgtggaaaaggtcctggaagtgtttcaggatgccagagttgaagtatgaatactcggctttttcggatgcagatggagactgatctctacaggttctcgaaggtgccaagattgtagaaagaaccggggccgttgggaagatgcgcagtgtatacgtgagagatcctgatggaaatcttatcgagtgagcgtttccccttttctcttggagtactccgttgactaaccccagcgacagagtgtcgaattatgtttgatttatcgataaaccgactgtgccgagacaatgggatagctattctcatagcgggaactacgttatgggcctgttttccctcctggtgtaatagaccttatgaaagtagaatgacctgggacagcagcctgcagattatatataggcaagtgtatccctcaaaccccaaatcttatgatctatacaaatcggaaactcgaaatgtattgatattctaatgcattcttaattctgttgcaaaaaaaaagtggtagaaaatcaactcctctcgagtctttggtacgaagagagatacgcattctcagatatcaatcggaatatccgggcctctgtaaatgcttgcaaaatcgccctcaccatgtaatggttcaagtcttgcccatagtgggaagttgaagtttgttgacttggacatatcgcatctcaaattattccaagagccgaacattgcttctatcccaatcagtctcaacacctggaagttaagtttgagctctcggcagtctatgaagcatcggagtttatctctgaaatgatagacgttggcacactgctgtgggtcccatgcaggtaaacgcaagacttcctgataagacagggagcctggtcttcatctaagtgtctcgggttcagattcaatgcaaaaacctctgaatacatatctctcaatcaatcaaagttcagttgacctgcgccttcttgatgcaaaaagaattggctgatctttgagatgatcggcttcgcctagttactagcgcactgtcaatatatatcatcattgagtcttttacgccacacaaggagtagcacaagctccgtacctatggttaccaaggattggtcccgacctcttataggaggagcatagaaagtaatgtctaactataggccctagataggtctatacaacccgttcacgtccgtactctctcttctatgattacatcctattccttaatagagggaatggcttctaactatattgattttcgagactgaatgggatgtcgatcagggtggggtagagtcgctgaccgccatgatattcctaggtaagagtgatcgtcttccattcccctcacctcaccgttatctccagccttctccctgctgagtttgtccctatccaaattcctgtggctctccatatatctgatctgaagtgccctaggattacaaattggtccttcagatcttcagacaacccacttcaattgtatccaacatgccgtggcgtccagacgagcccgtggaacttcccaatggccgcctagtgtgcagacagcacggactcgtagtttgcggctactgcactgtggactacagcttcatggacgacgatgacgacgatgacgtcgatgatgacgatgacgacgtagaatccttagactcaagcgaccacacggacggcttcgtcgctataccgagaacaggctcagagctcagagtcggcacggggggcgtcttccccacgaagtttatgcccccaaatccaaatgataccccgaagtcgcttttcccactcaccaaatccgagaacgccttgccacctgtatatcggttcattcgccgcaacagccaaaaaacccaattcctggtttacacggacggcgcgtgcttagacaacggtggtgcgaacccaagagctggttgctcctttgtttacaggaattctacgacgaaccccctactccatggctttttaaatttccctctcgagaaaagtgggcccactggtatcgcgaacctgcaaacaagcaatcgggctgagcttcgcgctgtcattgcagctacgcgctttcgctactggcttggggaaggatgtcgctgtctagtcatcgctactgattccgagtacgtggtagagggcataacgaagtgggtgaaaaattggatacagaaggactggaaaacaagtggcggaacgccagtcaaaaataaggacctttggcagtgtttactcggggagatggaacggtgggatgacagaggaatgcgtattcaattctggcgtattccaagagaattgaatacagaggcggacgagcttgctaaattagctgctgataaggatggccctcaagaatttgaggatatcaagggcgtccttgtttgagggcatacgagcacagagttgctaagtctactagccggcaggttcaatgagaagttgttctatctgtacgtaggaattgggcatcttccagatccatctggattttactgttgcattcgattgatctcaatgttatgggttaaaccgaagcgtttaaatcgtgttgaataagcggatagctacctgcaggctgcagtactagcccaggtcagcttaggcttcgatgactcctttctacgatatcagctgagtgtggcatttttgcaatatttcatattcgactaaacgtgtagtcattacagaataatatgaggacacctttgcccaaaaccaaagcgcaaaccctcaaagaagaccccgaaaaaaatcctaaaagtcaaaaaaaaaatactatacaggccaaacgactcatggtatctgttgcctctggtcaaataatcaaaggaatcgcctttctagacgaggttggtataagtctcatgctaaataagactgagagggtcttcgcgggctatgtaaagcgcactcgcccgaagcttgactgatattgcttccccgataccagccctggtcaatcagccgtgtttccaggtctcgccagtagccagctttccccccagcgcctgttttcagatcgagatcaccaagacggatctcaacaggtgatttttcgtcatgtgggatctgtggatcggtcagtattcaaatctagatcatgtttcgcaacagacaggatcttgatgttgactacaacaaattgattttgcagcatgaactcaccttgataaacatcgtacagtccctcagcgtcatcgcaagcgacatctcccgggactgcgccgccggaccctgcagcccgacatctctttcggtcttctgcagcgactgcagcctttgtagcgtcgagttccgatataaaatgtgagctagtcgcgatctgtccgtgcagcctttgataaaccctgtcgctcgcagaacattctcatactgctcggacaccagatccagcggacagaaggaccgctgctctttcaggcctaggggttgcgactcgcggtttttcatctccctcagcgcacaagtccggcacctatgcgctgtggtaggcgccgatggcgattgattgagccatttgggtttcagctcggctaggctcgcgcccgggtcttcggtcgttgtcatgtcggtgatgaggagaccgaatcgctcatgtagacagagatagctgccatggcgtttcttcggacgcgtaccgtttaattcggcgatctgaagttgcgagttgcagctagagaggagaccctctgggagtctaatgagggtttggtcgactagttcctctggtttgaataatggtcggatgatagtgtcaaagtttctagcaatctctttgtaggagatgtcggctgcagtctctttgcggagtcggagcaattttcccttgagttgggctggtaggttgcaatgatcctcgaatgcaggtggagatagtggcctttttgagtcttttttaacgagtactggatttccaacaaatcggtaaatcacatttgctcctccctcggcgaggtaaacgagccgaactcccgaggggagttcaaggagattgggtttggtcatccgttagaaggatgggcgttgggctggaaatcctctgcgatcatgacgtggctgatagtagacaaatcgatttagatcgattttgttaactccgccaccgacgataatgcgtagaatagaatctaagatcgaaaggttgggaatgtgaaacaatgctttaatgaattatgcagatgtatccagtggcgagaggctcaaagtggtccaaaggggttaaaccgagtttagtcggatctcacttccaggctggggtgtccaatcagcttcgaaagcgaaattcaactggcacgtctaagacattcaccaaccgaaaggagtaggattcgagaaaaaaacggagattccggacaaagaagcccgacattgactgaaaacccccggggcaagggtttagttgtggggactcaataagagtgcgagtggcgtaacccctagagtcgatcatagcaaaggagttaaagggtctaggaagttcgggacatcatgaaatcaaggaacctgaaatcatgaaaaggaagatctccatgaagttgtagaattggaaatccccagattcagaggagaaaatccgatgaagccgtatttaaagacaatggcggtcaggaaatcggatatttcaaattgtagagatgcagcgagtgagactgtgcaggagccttggaaagaggctcgagggtctgtcaatatcagttgggatgtgaatctgcaaatgtctgcaataaggaaatatgtcaagatgagtgaaaaatgtcgtaaatgtcggaaatggaagttcaaccctctatggcgtgtcactgaccacatcctcatcatttccccgggttatactcatctcatctctcctcatctctccatctaatctccctcctacatcaccccaatatccttttaccccgccatttcaccatcaacatccaacatggccactatcgcaacccccgcccactgtatcgccgacttctgtctggtccctgtaaggaagtcacatgctgctattcacctcccccgactaacagcataaccccagatgggcacctccacgccctcggtctcagaccaagtcgctgacgtctatcggatgatcgaaacatgcggcttgaaatatgtcatgcattccgcaggcacaaccctcggtacgtatggagtacatgtctcgaggctataatacgtactacactatgcatagtattgtagtactacctcggccactccggccccattccggttcctacttgtgtagaacctgctcctctcatctccaactgtgggctgatttgtctctacggctgaaactaaaatcaccggagaaagagagagctgagagctgagaggcccgtgtgacactattcctatacttactgacgttcctggttttgtagaaggaccttgggatcgggtttctcaagttatcggacaggcgcatacgatccttcatcagaagggaattgttcggattcatactgacattcgcgttgggtcgaggtgcgttcatctgtttaatgcctccatttctcattgctgatcgtctttattaggaccgataaggtgcagtcgtttgaggacaaggtgaccaaagtgcagcagttattgaaaaaatagaggagttcaactccgaaaggcaataaaggcaattgactttgaatcatctcattcgttaaactatatgactagactagatatcctgagcttgggggaaatgctgaaacctgccatcacatcccaattccaacccaaaacgccttgctcttgaatggaagtgtcctatatccctgtgtaccgtccagtcagggcacagccccatatcgcaggactcaaaagatatccaagaaaatacatccgaacgcttcaaatgtaaaaaagcaaagaaaccgaggtcaaatcactcagctcagaaggaaattcccccaccgagaagattaccccagttcccaccagtccaaatccaatttcccatagacaccgacgtgcccgacttcgccgattccgcaagcttaaccagcgccttgaacacattactagtagacgaggcatcactagtcgaatccgccgaagtcgagacagacgtgcggccaaccgcattggtgacattattcaaggtatcgacagtatcgatcgccggaccacggttgaagaagtccaccaagatataggtcggctgtcgcccactccacgcctccttgcaagttgtcgccgcagtgcccaggttgcccgttccgccggacgcggcgttcgtcgtggccacatagctggagttcgggtactcaacgtccagtatcgcgaggctgctcgagtacagaaagtgattcatcaatgggagaaaattggctgctagtgccgatgcgctgttgtctttgtatgccgacggtcggtccacctcgcatgagaagttcgacggggaggatacgtcgtatggattctcccagatgtagctccattcatccatcaggtaggggtaggtggtgctggtgtctagtgaggccacgaagacgacgaggcgcttgccgtcgtcgatcatggtttggagggttggccaggtggtcggggcggtgcctggggatgtcggctcgtaagcgtagtcggtaatattggctgttgtgaattgggtgttgagctcggaggctgtggcgtcgtcggagttgactaggaggattgtgatcactgtttggatgttagtttcctttctagacgtcgtcgcggaactaactcaccctcgttgggattatcatccaaccacgtcttgatgtccttcagccaatcgctcagcaaccccgcatctagcaggtcgcagctggaatggcataggcgccattgtgagttgctcttgtggacttgggctgttactaaacggacacccgccgatagttgtgttggagtgtcgtagtactggttggcagctagcgagttgccagtatcggagtcacgcacaaaaggactatcgtgggcgcccagatgtgtaatttctccataggacttggagcagagatcaggagagttgttgcatgctgtcgtgcgcttcgtctggaccaaagggttcgcaaggaccataggcaggaatgccagaaagttggatactcgcataactgtacacaaatgatgtattagatgtaccaatatacttcaagattagaaagaaagatcaaatagaaataagaaatagaaacacaaaacaaacagaaaggagacacaagacctcaaataaacaaaatatttgtctccaaggccgcgttgccctctcaactattcttagatcggtggagcagcaactgcactgccattgggccatttacaccaatcgacctcctctatttgtgacatagcccacttgtctaggcataactattgtgtacggttttatatatggtttttcttactgacccttgacgatcaatgtctcaactgcggggaatgacatacgtgtacggagtatgttgtgcgcagattctcggataatatgggtattatgatcaattatttacgtatttgctaatatacaggcgattcgcaactatcatagtcctttaagcgacaaacgtatacccggggcgcgtcgcttcgttctgcttgctcgtggcggattcaccaactgctccaagttctgttccatcccatcgaagagagatggatcgccccaagcctggaacacatcgttcaacacttgttgaaggggatacgggttacgccgtcgcagcatgcgattcatgcgccgcgctgacagaatatgatggctgtagagcatggccagccggtggcgaactgcctgtgagatcaatcgcttgtcaagacgaagaccggatttttctagctctcgaagaagaatcagcccccggacccatggaatgagcttctcgtccgtttgggaattaggtggggggatcgcaaatttcgatgcggtagtgtccaatactcggaacatgaagccccaagagacgatggcggcttgcatttggggggtaaagacgagatcgagcatacgccgatcgcgaccgtttgcctgcttggcgggatcaagaggggatttggaagatggaaaattcgcccaaggcttttgctccgggctttcagcgtattggcgaacgagccactgacagcaatctcggagtttatcccagtctgcccatgcgtctgccatacctagacgcttgagcatctcaacccagaatgcagcactgacataccctcccgcgggaaccacgcgctttagaattttgaagatgaagatcacttcatcgacggcagacaggcgttgacccggcggtgggcgatggttcattcgccgaggggtgagaatctgctcggccatgaaatccacgctttcttcgcccaaagtacgaccacgaagagctagctcgtcggcgaccttggatgccgcgctcaattcccaggctgcgatatgcttccgaaagtggatgtcgtacagatctggtgcgcccgggtataattctgttaacaccgctagagtcatattgtacaatcgccaatcccgggccatgtagtaagataccaacagtgattcctgcatacgcttgtcttcaagggtctcgggatgctgatcgctgcggaggacatcggagaggagaatgtcgcggttctgagttgcaagtttctggactaagcgtgagaagacagtacttcctatagaaataccggactgcttaagtattttaagcttgtccagaagatcttgattaccgtgggctctcgtggctagttcgcgcaatgtccggtggccgatctctgatacgccgagcatcttcaagccaccaacgatcatatcgaaattgagagcacgagtggcaaacagtttagcacctatgtcatctttgaagggtgtttcgtcttgcgaccccttttccttggatttcggggctgtatctattgggccaggttgatcaatcgaagcttcggtatcaaatcgctttttgacatagccgcggagccgattgaactctttccgtagcccgaatttctcaacatattccagcaatggctgtatttcctcggggctttgtgggtgatcctgacgtcgagcaaggaaatgatgcattgagatcgctgcttcgccgtggccttgctgcatgagcaccgcaagtacagggccataaaaattatgctcgggcatcgtggagcatatgtcttggaatgcttgcaatcccggcgacaagggcgaccgctcgagatcagccaaagtcgcaaattccgtgccagccggaagagacgaatgcattgcagagggaagtattttcagcacgtcatttgctctggctaaatgagagcgttgaagcttcttgtgccattcgactgcacgttttgtcaagccttgctccagaagtccacccaccacgcgctcatacagctgtggccatccgttgccttgttgctcccgtaaaatgacagcatagtcaagaacctccttaagaaaaagctctcgccttaatcccatgtccacaaagctttgccaaaagaagtccgcttgctctcctgcaactgggagccgtacaccatccactcggaccctcaacccttcccatatgtctagagtaccattgtcgccgtagtgacgctgacggtatcgaagaagctcctcccacagatcgaaattatttcgatgctctggatcgtccactaatcgcgttccaatatcgttgaggtgtccgacgttcgattcgaattcaagcttgtccggtcggagagacagaagtttgatagggcattgtgtcgtattattaggtgtttggctctttactagaggcgtgggctcaagggtgtttggttcattcgaggcctcaatgtcgtagatgggaaagctgaatggccgtttccctcggcatggatcctcaagctgatgccgggtgttattgtcgggttcctcgagtaattcttgtttggcgcttcgcgaatgacatcgtatacaccggtacctggactccaattgctcaattccgatcggtgttgctgtgagtgtgtcaaggatcgagacggcggacggcctcttcaacagtcgcagaagcgccgggcgcatgagtaattaagaaaggaaggtcgggaaatcaaattatcaacgtcaaacatccttctttgagctccccacgtcaatccaaaaagttcgttgtcgaatattcaaacgttgatacgcgtctgggcacttttctggcgcttttcccttttgggatgatgactagatgcaacgtctgattcgatcaggtgatgctcagcacgtgacacgatatccagctcattccgggaccaacttcacatccccatttcgccctcatcgtacctcacatccccgctccttcttcgcttacaaccgcgaaaatgttccgtgctactagctcccgcatggctgggtatgtactcccttcgaattgccacaataatcccccgcgcacaaacccgactttgagagtgcgcccatcgaatttcctcccacgatcttcggggtccaattacgattgacgcggctgcgggacctgtcatcccaccattaattacaatttatactgactggttctgcttagcttcgtgttccgtgagaaccgtgtgccctactaccagcgtctcttccagcaacacgatggcaagcgccaatggtacaaggtcagtacccgccggaaggggcatatgccctcaatgaagtttccggaagaacaagaaactgacattggaattgtctcgcagacctcccgctccggctacgtcatgtacccctacctcatctctgtctacggcctcggtgctggtgagtagacccgtcttccgatatgagatccggtcgaggatagaaactaatcgtcaatagctaccatgtacgccatgtgccgcatggttctcgttagtccacccagccgctacttctcatactctaacgagaagcacgagcgttcatatgctaacttctttacagggccacaagacttggtactaaattataggtctcaagacttagtccggcagagacaaatgatgccatttccagtttcgttggttattcaacctgcggcatcagttgttttttgtatggtgtatttctactccaggaaggggttagatgggttggcagccacgcagatttggagctgtacatatgatcaattcaagcgccaatcccagagatgctgccgtaaatcatttccctggtttcacagaactactggttcggtctcctcgcccaaattgggtggtactgtttttgatagaatagagatggttgtgctgtgactcgcaacagcccgaagccgagctatcttagctcttgttggtctagctagacatccaagtggtgataacacactgtctaggtactaagtacagtattgctcacatgtacggcagtggagagatatcttagttaactattcggcgaaggtcgaaatggatgactcattacttgcctcgcccaggccggctccaggcgtacaagttcattcaataatatctgctcaggacatatatggaacaaattgagtacagaaaaagctcgtagtggatgaggcaggacgtgctaaagacggttgtgggcatcgcaggattcaagcccggggctcaggcgccccctcggcccgcttccatgggctcacccccgggtgccccgggccgctttataattgattactcagctgtttcacagcccggccaattttatggtcttacttcctctggaccacaatatacaatggctttgcttgtgtgaacctgtatatccctagaagcaagagcatgcaccaatcatatatatatctcgatatagcctgtcaattgaggcaccgaagtacccgacccatgctcctataatgactgttctctttgagagcattgaatataacaatggaacacgagagcttcgcctattcagagagacccgctaagcgggttcgtcaagcctgtgagccctgcaggtaccaaacccctcagattgtttacaaagatagctgttaaccagtttcccaggcgtaagaaagctaaatgccccggagagcagccggtctgttctctgtgtgccaggctacggcaacaatgcctatacgccgatgaaaggcgtcggccacatcccgagttgagtccacgacccagtgattcagaccctcgaacatctcgggtcctggtgagtatttttatctctcaatgcaagcccgaagaaattttatgcaaatactgattccgtcataggaagatagattgcgaagccttgaaagcaaagtgggagaggttctagatgtacttgggtaagaacatacagaacctctatgtaagcaattacttactcttagaaacatgttgcagctcgaggagtgagccgcaaatacccacagaatctcttgtcccgtccgtgacattgtcaatgcgaagctcatcgattactctaccaccatgggaggagattattcccattgcggagctctatttgctatactgtgactctcagcctctacctcttttctacagggatagctttatttctactctactaacacgcgaggcggagcttctttttgctatattggcactcgcctttcgcttctcgtacactcaccacagcagggccgattccactagcctgatcaatggctatgctgaagttgctcggggcctcgttatgaaaagagtctcagaagggccagtggagctttcgacacttcaatgtctttgtatcttgagcttggtcgactttacgagtatgaacctagcgtttccaacatttaaactcgagctaataatatctcccagacggcaatacacatcggtccagtatccacagcagcttagcgatgaatcttgcacaatgtgccaatatcggccaagagccccgttcgtcgaccagtaccatagttcgcgaagaacgcagacgctgcttctggagtatatgtcttctcaaacgactacacggcggcgacttcccaatcccagacataccccaatccggaggccctccatatccccaaagcccgacacgaccagcactcctctctccgggagcatcaaccgccgaaacacggcgaagtgacatgcaagacgagggaatcattgcatatgtggtaatgctgagcgaagtgttcgcacggacagcacggtacgtgcgacttcacgggcgtccaagcaacgtcccaccttggtctcctcattccgaatactccaaaattctcgctttacaaatggacctcgagactcgcatgccatatcttcataggttcaagccagccaacctcggggaacggtctctcgaggaattacagacacatcgtgaatactggggtccgtggtttctgaatcaattcatgtatcataccagcctatgtctactcaatcatccattgcttctctcgctcagtcttcggaacttccggagtaccatcccggagattttcttgcagcacagctcagacttgatctcttcgcatacaacctggatcattcacttcatcaactgctttgaagaaaagtcatttctagtatcagatccattgctggggtacagtgccgccgttgtcgctacaatcgagctgcaactcagtttcacggatgatctgactatcagggaacataagcgtgagagattcgccaagtgtgtgaagtttgtgcaaaccatgggagaacggtggccgcacatggctcgactggtatggtcccatcttctggctctctcggtcaaaacaacaatctaataataccaaaaggcacatagattacagcgactagaagacgcagtatcagcaacctaccaatcagacccaggcgcgcaaaaccaaagcctcctgattgacctatctcgattctgggaaatcctcgaatactcatccaacagcgacacggactctgctcggcgtctatttggggattcactttatgtcggttcttcttccgcaggtggagaagtatctcagacatctcctttgcctccgccgttccgcttgagtgtccaggagcaagatacaccaaatattcggtctcagtcgttcggtaccaatactgcctttcctagtcaggactacccagcaagctctttggtctcgccgcagcacttgacgatgtctaatgatgagttctctattcttgccgccaatttcttttctcaggggcaagagttcctgcgcagtggtgataactgggagagtgttgggaatttctaagggcttggaacagcagacttcaaatcttgtgtgtctctacattttcttcgatcctgtgattgaatagctactagcccacggcatatcattcatggtgcattgcattatcatactcgacatttatccacatctcacaatattaattatcaactaggaagaggccaaagcgcccttgaattccttgacaaagttgaacacctcggagaaggtgttgtacaacggcactggcgccacacggacaacacccggctcccgcttgtcacagatgatacccgcattctgtaggcgttcggacaccttgtgcagcaagccaggcttgagcaaaacactcaattgagcacctcgagcattggggtctgacggagtgataatatcaaacagacgagtctgctcgtcggtatccttgagaagcaggaactccaaatacgccgtcagcttcactgacttttggcgtaaatcggccatggaggtctggtcaaagacggacaaagccgcacaaagacatgtcagatcaatgactgacgggttggacacctggaagcctccagctccgggaataggcttgaactctgctggtggtcagcatatgctagaatatgtatcgcgcgacacgagtaagaagaaactaactgttgtccatcttgaacctcaccgatcggtcaccaccataccatcctgtcaagcggtgacggaacttcggagcatctggtccagcgctgtaatcgacctggccatgtctctcgtgcacaaaaattccacccattgcgccgggcccggcattaccgtacttgtacgtgcaccaagccgcgaagtcaacgttccaatcgtgcagcttcagctccacatttccatatgcgtgcgccagatcccatccaacgacgaggttctttgattgggcgtacttggtgattgtggcgatgtcaaatagctgtccggtgtagtattggatgcccgggagaagcagcagcgctgcgctgtcggcatgttcatcgatataggacaggattttctccgtcgagatctcagattgaccctcgtctgggccaatgagaatcatgttctcctttgcatctaggtcatgccaagcaatgtgtgattcgatcgcatactataaacgtgttagcgatagattatcacctgcaaacatcattttcattgcaggttatcactcacatgatcactggggaatgctttccaatccatgagaatcttccgcttagtctcagtcggcttatagaagcttgcgagcaacaggtggaggttcgtagtcaacgttcccatggctgcgacctcttcaggcgcggccccgacaatgcgggacattgaagcagctgcctgttcagacagtagctgccattgtttcaatggtgagtcttcaagatcggtaaaatgtccacagacaccgatggacgaccaagtatccaactgagcctccatatacttcgatacggccttgggctggatacccaatgagttaccgcaaaagtacgtgcttgggtctgacgacagacctgcatgatcttgttaaactagatttcgcgtttccgcggggatatggttctcacctggctttgccagctttttcgtagcgagattcgccttggagggaatgatgaattggtcgcggaatccacgcagaggatccgccgcatccagagacgcggcataatcctgggatgctgcctctgcaggatagactggctttgataatttacccgtcatgttgcctataaatgctctcgtgaaatgcgtcgaatatggtaagttaagtcaagccgtgaagattttagttgcaaccaacaatgaggggaagagaagaataatgagtgcaggttggaaatggaattgctttttatacggcaagtaggggagcaccgaatcggagaccagggaccttcaaaggagctggcaatggtaaaccggacggtgttccgcttccgcctccccgatccgcctccctactgtttataagtggttggctacttccatggataacctatcgttacatcatggcttgacactcataacataaaatatatagatttctttctcctaggactatctgccatggattgtatgcattaacgcatgaatatttgcagatggcttgccatgcagaccacaacacgacctaggactctttgttagattggctatctcaagtatttcaatctggaccaatgtcgatctctaaaagtggtaacaggaaactaatttatgccgcaagtatgttgtacttttgaaattattcggtgttgaaccaacggagtcatactaagcctatctgtggatcacctcgcacagttataatatcccgtggagaggcggaacacggatatagatccgtatatcttccggattgtatagatcttttgactaaatggcccggtgcaagccgatgcagtaagatatttcaataatgagcccatataccactaagactattctcgcattataaacctaaaaggctgtcttttccctctgtctttccacgccagacgtgctcttcctcctgaacgaacactcctacacaatccattatccacaatgctgcaatcaaccgatactgttctcaatgacattttcgaaagctatgctgagcagggctttctctcggattgtcttccgctggccagacttgcaaacccctattacgaggcctgggaagatatagccagccaactcccgaacctcatccaaacaagccaaatccgcgagcacatcgataatatgctcgtctgcacaactgagcatctcaaaacggaaccagaatggcgacgtgcatgtgttattatgggatacctggcccatgcctatatctggggaggagaaacccccgaagacgtaagcactcaccaccgttcagacaaagatatccctaacatccagataacagagacttcctccttcaatctcaaggcccttccttgaaatatcagcacacctcgaacttcccgcctgcgccacatacgctagcctcacactgtggaacttcataccttcccacccagaagcagacatcacagacccggacaacctccacattcaaacctccttcaccggcacaaaagacgaggaatggttcatggtgatctccgtcgccgttgaagccaaaggcatcaagctcatctcgctgatgcgggacgctttcaaagcagttgctgccaacgacgtagacctactcactgccctcttgtacaggtttgccgatggcttatgcgacttgacattgactctgaaaaggatgtacgaacataataaaccggctgtcttcttccaccagcttcggccgttcttggctggaagtaagaatatgggtcacgctggtcttcccaggggtgtgtactatgatgttggtgatagtgatggggtggaaaggcctgagaattggctccagttgagtggtgggagtaacgcacagagctcactgatccaagcacttgatattttccttgggattaggcactctgcaacggatgggaagcaagcttgcggtcctagttttatccaggtaagagcatcacaagatcttagttttcagagtctctatcttgagacatatgcgaatcagtactaacaccaaagacagcaaatgcgagactacatgcctggtccgcataggcgcttccttgaagagctatctggtcgagctagtgttcgtccgttcatactggagtcgtcggttcaatcgcttcgggatgcatacaacgcagctgtgaatgagctcaaggctttccgcgatacacacattcagatggtcacacgatacattgtcatggcatcgagacagcctaatccggttcaacagggaaaaggcaaaatgaatctagccacggctagctctcaaatgaaggaagcaggcgcaaagactaagcttgctgggactggtggcaccgacttgatacccttcctgaaaaagaccagagatacggttcaagacgctaagtgctaggtgttcatatggacgtgggatgattaaacgaacatttgtgatatagaattgtcttgcaatattgtaaattgagattggttgtttgccgctagtactatagttcaaaatgaccttcctaaataaagaatcatgtcccgaactatgtagcgttggatacgtcctgatatccgacatcaacgacgagaggactgtattcttgtggaatttcctcttttccaggtgaatagcaaatccccgagtcaaccttcccgcaaacttggtatgaatatggtttggatgggattcctagtgcattcctaggaccctaaagcatggtctgcaatgtcccacctcgtggatatcgagaaaagggccccatgtgagtgttaggaacaaagctgcgatgacgcaaatactccagcctcgtggtcatagccggcatataatgcgatagtggtgatgaatttggtgcaaacagacaggttgtatcgtgtggtcaagcgattatcaaaagcataaagacacgaacttcgactgttcagagcagtagacatactcaaagtctcagcacttaggaaatctggaccagggtgatgagaattgttggccaggcacattctgggtgcccaaaagccaaccacacggcgatggcctggatttttggcttaagagaaacgcgtaaagcaatcaccgcttcttcgtgttggcgggcacaccctcactctctcgcagctcggccagatacctctccctcttgatcaaccgctccttctcttccttgatcatctgctcaactgtctgagtggcctcggccatgcgatcaagctcctttctctcggtcatccgactgtatgggttcccgggcgcatcactcatcggaatgtccgccgttctctgcgcaacctgcttggtattcttccccttgctcttgccaagctgaccaccagcaaagcctccggtaagtatctcgtagaacggctcgacgggctcattgaaaatgatctcttcgtagttctggctgaccacagtctctcgacgctccttcattccctctgcatctgggccgtaagggtgtagcttcaggctatgccacagggtctggggcttctcatttgactcgggcacaaagtaaagcttgatctgaatttcgaattcaccccagccagtctcagaaacttcgaagggcggatgctcgatcgagcgcacattgtgggcatatgtctcatgtagcttgaattggactttctttagccagtaggagatgtcctcgccgttgattccctggacgaatatctcccacctgtgggtgtgatctggaggacagtctgggggcctgttatcgggatcgaaggggtgcgctatactgccaaatactgtgtttgttagtttgtgactgttggcgatcatgcgctttttgcggacataccaaatggtcggaacaccgagacaccctgcgagcgtgttagttaatttaattgtaatatttctagagattgaagcataccctgacgcgcttgtttcctgtcgcagacaccatcttgtaagttgtttgtggtagaaccagatgggcatggtttgtccagagcagcaagggcgcaagaaaggcacggaggaaggataatccgccggggctcaagcctgacaaggaggcgaacgataccgaacaccaactttagagtcctggtcaaggaacaattaccttgaattatttaactattttgcttattgaaaagcttcatattgacttcctttgctcacccctaaagtctcgattgcgagcctaaatagctaggaatattgttccaattctttagtgacatcattgtccagagctatcccaaaactacagcatgccgaacaaaagactagttgtcgccggaggaagcggttttttgggtatgtgatagccagcgcagagtatcaatatcatttcactaactagctattccaggttccagaatctgtaaagccgcagcagcaagaggatggacagttacatcgttaaggtagctttcccacctatttatgaatctacggaagagcacgatactgatagctgtccagtcgatctggtgagccccggtgggacacagtcaccgactctcaggaacggcccagctgggcaggctccgtggaatgggccaaggccgatatcctcaagccagagagctacaagccacatctgcatggtgcatctgctgttgttcactcaatgggcattctcttggaagcagactacaagggagttgtgcaagggagagtgccaattctcagtggccttcaacgagcttttagtacatctaagctcggaagccagaacactctgacaagacaagagggcgaggctttggaaccaaaggagaaagataggcagctgacctatgagctgatgaatcgagattcgggtacgtacaagagttccaaagtctgtttcaaaagctaacatgtgtgtgatttagcaattgcactagcccaagagtccgccaatgaacatgttccgaccttcgtttacatctctgcagccgccggggcaccggttctgcctgctaggtacatcagtactaaaagagaagcagaggcagctatcatatccactctcccggacctacgaagcgtcttcatacgcccgggcttcatgtacgactcgagtcggaagttcacgctgccaattgcaatgggtggctttgttgcctcggagttcaacacattcctcgggaacaggcttgggttcctcggagctatggccgaaaagcccctcaaagccgacgttgtaagcgaagcggtggtcgaggcattggaggacgagtccaccaagggtgcagtcggaacaaaacagatcgaggcacttgcaacaaaagcctggagaaagacgatgctttaagtctgttggctgatcaagtgacttatgtttgtaaacaatgtttctttttttggcagaggggaaaacgcgtggaatctctgctggttgattgatgtcttgtccaagtacagctgtatatcttggaacgtccactcatgtaaaatatcgcaatcaatctcacatttaacttaaatcatagtgccacgttcgaagctgtcccgaatttcggtggtgtactagagaactgttagcaaaagatcacacaaagacaaagcaaggggacactgaccttgttgtagaagcgagcgagtttctggttgaactgcctgttcttctcgttgatatatgtcacatccgcgtcatcatcaccaccacggcgctctttacgtttcttgaggcgcacttcctctgccttctggatatcgttgaccagtctgtcaacagcagcccgatctggtttgctctccgtaaagccagtggagtccgcagtggaatagaagctaccgttcttgtcgattgcaatcatttcaccgtcctcggtctccacgatctcgagatcgccattggccgcggctctctcgatcgcggcaagcttgtctttctcgtaggactccaagtttggcgccatttctctcaactgtctcttgtaaatcttccgggcatcttgagtgtagtcttggaaagccacgtcatctcggtgacgttgtttcttctccatgcgcctatcccacttctccgattcatccactgtccagtcccatgcacgcttgcgttcaaaatcctcgccttcagcttccgtgtccgctttaaggaggttgtgggaggcgaatgcatgcttgcgggacaatgtgtttagcagggccgggtcggtggtcaaacgctgagactcagctgcagtctcttttaagttgcgttccgttgcatttttctatatggtatgtcagttatgtaaggggttggtctggccaagtctattgatccgcgcaaatcatttttggaagccacttacagctcgagcctgcaaggctttgaaccgattcattctctcgcgcgctttagatgcagcgtcatcctttgtttcatctgttcgggtttcggccttgtcttctgaagttgcgacaggagattcgctcgtgttctcggtcggttgctcaatgaactgctcttggctcgcctcgtccttggcagatttatccgcatttctggttcgaaccatgatttccttgggttaatcaataggccaatagcagctatggacagagagcggtaattgttttgttggcagctaggttgataggaaatggaaggtggttgaagatgaaataaaagcgcgaatgcggtcaattgccgcctcccacaccgcccttgatctgctggcgaaaccccagacttccaccccttatcgggccgtgtttatcttctccacatcttctgggatcagctttactctagtcgtcatgggagggctacacaatcggttgttgctgctgcaagccaggcaacggcttaacactgggaattttctgtcacggcaattggtgcgcagtctctatcccgcaacgattaaacgaccacatgacccatcaccgtctgaaatgcttcgattcgctttaagagattccactgagccaatttatgactcgaatgttaacgaggtcttatctgaataccttcgtgggatttttatcaccgaatggaagttgaatactccgccttccccgttgtggacctccctcaaagggcctacatcgcggaaccaagagttgttgtggaattccaatagcgacatcgccgatgtctcttccttgcggagtctaattgagagatatgtcaacgacagacatggagcagagattttgcagacgaataattgtttaccattacatcacgctttgcgacgctgccaacgtaacaacacattggcagaaatcctctcggtgctacgtgacttgtttgcaaggctgaagcgtctccagcttcccatccggcctggaatgtacactatagcgttatacttcgcatctcttgatctttcgccttctgatctcaggtatttcttggatggccaacaccacatgggcgctccagctctaagtcccaaggaaagtctgcggatagtccgatattgctctgaagcacttgactgcaaagtttttgaagacccatactatgaccccaatcccattcttgccgagattacaggcgaaggagaatctgtgaccgaaagtcgcaatttgcatgataccttattctggacgcaatctactgatcaaatcggcaaccgattcaattatgagaccaaagcccaggattatatctgtttacttactaggcttggtaatgatgaagtgcttcacagatgctggtctcatttcttgaagaacattcaacctaagaactatcaaagctgcatcgctgcctatcaggtagtgttggctctggtccaaaatattcagtccgaaacagcggtgaaatggttggaagatatctctcaacattgtggtgataacctgccattcattgcgaaattcccggacattcgattcctccttaatgaccttattataggcgaggcactacctgacctagtgaggggagaggactacctcgaactacttaagttttgtcttgaggacatggatcgaaggatgggtgttcaatggagccctgagagtcaaagtcatttcagtacggccttggacccaatctacggagcatttggtgatcagcctttacccaagactgataacaaatatgctggctatgatcatggcgggcaattgtatgcagagcttcgcgttcatggctgctccaagtctccggttgcactggccagggtcgtagatctgttgaatgaccacgatggacagtcgcagaatatcatcactcatcttgattacaatgcggcacggcttaatgaatttcggtccaaatttaaatctctggaactccgatgggtaccagaacactcaccgattgaattctctaactcccggattccggcgatacgtgatttctctgggcctatgaccccatctaccctaggccttattcgggctcgtttgatcattcatgcagttcctcaaatggggatcgacaatttacatttgatgcaactcggctgcatggatatgcggcatggtccagaccaaccatggcagccatctggatatatcgtggtttgggatcgtcatcacagggaactcctcgggctgtatgttgggcagaacactggtgtcattagctgtggagcaccttcggatggccctcttggtgccttgatgcatctatcgctctcaaccaatcctgacgagcgaacattttatcctaggggcacgcgcactcattctcggaactgctggggtccttactatctggatgtagatccaagtgcagatctagagtattgagcgttttcctacagctctgtgagatatctatgaaatcatgaaatcatgaaaatgtcttttggacactgagatgactggatgttgttatgagtgagcggtgatgtgcttcggcagaattcaaatgtaccacaacgttgtagtcaccgggcatatccttttcggctactcttccatctccaatatcacttccatattctcaacaaacggaaactctacgatattctgcctcctccgactagaatccaacggagatcctacccatgtaccctataccctatgcctgatcggcctgcttccggcgtcctcggagagtgacatgcactgagattaattttccctgcattagagtcaagccacccaagccattttcaatatcaagtattgtccgtaaggatggggcacaccatcgaagtcttggatgtgcctggccacgaatggtaatttgtcggaatatctcttcctattctggcttacacttctcccctgcagcacacagtaaccgcagatcagcaacgctctcgaggcaattattgcagggaactataacagccagcgcagccacacttctacgtggcggtgcatactgaaaaaccttgacttgcatagtttctcagtcgcgctatatcataggacaattatcaaccaccaagtactgcagtggggtcattgtgatctgcgtctagcctaaagtcgacgcatgagaactgacctggaagctcacggggccttagttcctacacctgccaatgaagtttcaaacggtcacccttgacaactcctgcatttgcaggtcgaagaattccaatcccattattgggacagatcaattcttccaacattgcaaaatcttcacgaatagtccacagcattggcaacgcatatgatatatgtagccacaatttacggatccattatatttacaatagactgtatctagcgcctgggcccagttgagtccgactacccttagttcgttcgcctcaaattgcagctgcctcgccgatcgatctgacagcaaacgatcattgccccatccccaattggaacaggtgtcaaagtccgcccgaagacccataattttgggggggtgcaatggtaagtgcattgtcctggaatgttaattgaccttgaattccaggaaaggtatctcgtgaacttgctagtttatatgcgtctgtgtttcctccgaaagggcttactgcttaccactgtcgaaagtatactccgggactgcatcatataccaggatcagcccgccatcacggtaagtcccagtgaacacagcttccagattccctgttgtggggggaggggcagatctttttttctgaaggattgccaagcaacggttgaacgccaatcaccgcgcctcacggcagcttcccagctccagccacttgggatttgaaaaccgggtcgataccagctggctgctccgaaggcttgtcggtcagcatccggcaaacctgctgttctgtactctataaagcggagatctgagttttctgctccaaagcccattacaccgggggtactgtttatcattttcgacggactaagacacgatagtccgccctatggtccaattcgtggcccactgcggagtactactccgtaaaccggttcgcaaaaaggcatcattccacgacaaggactttgtcactttgcctcgttttttcgaccccattagcaatatcctgataggtcaaaactgacaacccgtatgccgacacgagatacttcagcgcaccccggttcccagggaaagctttccagctgtacacgcgagttccacaatgcagaacagcttccactcatattcgattgcctgaccgtctttcaagagatcaaagaccccgagtcggggaccattttttctgccaggaacagtgccagtccatttagttcatatagctcctccacgcaccatttcccatggaggcacagcccacacctatgtccgcagcagacgtcttagtactggtttccccttcttgtggcaaaacccgctcggcccgttcccccggctcttccctttctcatcatcggtggatacggcgccaatcgtagagcatcagtcgaggatgtgtttctactagaacaagaagaagtatactgttgatgccatttgctattcgccctcggtccctgtcatattccagccctcgggtgattggacagctcgggaaacccggacaggggtgtttaaattttgcgctgtgcgtggacgttttttttcggtccctgaggaaacccggtggccaacgaataccccctagggaagtatagatccaatctcacagggccagcgaagaaaaggatcatacccaagtcgtgtcatgaggcattgctgttaaccggctgcattcacatgccgattatcagatgctttcattgaccgaatatgtttatctttcccatccaacctatataattatatctgggacattggctctgttctggtcgtgattatctgatcgctttgtgcgttatattcaatgcctcatctgaaaccaacccgaatacggcaatatctaaactataacacaaggaccaactgtcggcacttgcgcaaatctccgatagatgtcgaggccaccgccacagcaatgtgggaattccacatcggagcggccatacatcgaatcggtcccccgcactcaacaccgcggcccgataccaatgccctatccataccgacatgaacctcgacagaccataccccagagcacgagctatgagcaccctatgcacggggcgccccttggcccaaggcttcctgccttgattgttcccgaaagaaacgcagatccacgatatatgctctcgtccgacattgcctacctgaatacacaacatatgtcccaaacgctccctctgcgatcccatcaccaacctcctggaagctctgatgcccgtggttactacaacccatacgaagagagaacgtacccaagttcgagccatgcccgtgactatgatagtcaccggagctggacatacgacgtggagtcccagtaaagtccctctcttttcgtttctgtcgattaaaccacctctatctgtcagtcatccgtcctgatgcgatgtctttggcttgagaattttgaacaaaatcctcctctcacgtcacatctgtgacaggttacacaaggcagggagacattcgatcaagggccacattctaaccgcgaaattcatatagacacagcaacagttccacggccatgcccagccccgtctggtcagacaaaagtgcagctacgcacgcattcaatcctatactagccagtacccaccaaggtccgaaaccacaatcccgaaacgcgaactacagaatgccacatggcttcgacaagctcctccaccatgacccagagccgcaatcaccatcacctcctccacgacccagacgaccatccaccgaatccagataccatctccacatccggcaacagcccatcgccgcacgagcctgtggcgcaggcgacagagaccgccgccccgtcgacccacctccaatcgtgcagatcctccttaccgacttcgactcgaactcccaggaagaccgggatctcctccaagacccccgcttcacagtgggctgtctactattccccgtctcaccctctttaccatgggccgagccaacagaaacacatccgcgcgagcgcgaccagaatcgagatcaagatcgaaatcgcgatagagaacgagaacgagaacgagaaagagaaacggacggcgttgcccgtacagacgacaacttctcaaccccattactgtccggcaaagccttcatgtcccctttctacgtcgacgccgacccagaccccaactccgcacccgcacatccatcctccataaccgatgcccatctagacaacccccctcaccacgcctacaacaatgccgcctcgcgcctccaccaaccagctacctttttcatctttgcggatctctcgatccgctcggcggggccccttaaggccccgtttnnnnnnnnnnnnnnnnnnnnnnnnnnnnnnnnnnnnnnnnnnnnnnnnnnnnnnnnnnnnnnnnnnnnnnnnnnnnnnnnnnnnnnnnnnnnnnnnnnnnnnnnnnnnnnnnnnnnnnnnnnnnnnnnnnnnnnnnngcggtcggcgggcctctataggctccagttccgattgatgaattggggctctgttgaggatacggggcagtcgatgccgattcttgcggaggcgtggtctgatccgttccgtgtgtatcctgcaaaggattttccggggatgagggattcgtcgattcttgccgaggggttgaaagagcttgggtttgtagagttgaagacgagggggcatgggaagggaaaggggaaaaagaggcggtgattggttcttttctcttctcctgttgtgttgacattatcatccttcgaatatcttgattgttggtttggagtctgaatggctttgtctcgggtttggcacgaggaaaggaaatttgattcgaggatgaaacagggattgcgttcgattatttccttcgaacatgacgacagttctggtatcttactggcattttggtttctctttctgtcgtttcagcttgggatacgggctatatagaagaacagatatcaaccaaaggcccaaaaagaaacataaagaaacattgctatgatacatggtggaatacaggccaaaaaaatttacagcagagatataagtacaacagctctaaaccacctacgcaagcttcaacagcttaggaggcagaccagggttgaatgtccggtcttcccacttatccttcatctccgccaggcttttcttcgacaacgaggccggaagaccctttcgagcagcaagcttgtacatctcacggctcttctccatctcgccatcctcgcgaaggagcaaggccaggatatacccagcctcgttgttccctccatcaaaagcaagctcgtaccaatccatcgcgagcttgcggtatgtcttatgatccttgggttggttgaaaaacgtaacaaccccactcgctatagactcaaagggtttcaaccaggcgctgcgcgcagcattagcatcttccctctcttttgccttcctctctgcttcggtggtaaattggccttgggaggtgaggtaataaaaattagcaatgtaaaagctggctgcaatatttccccacattgcagcgccacccatgaacgcctcgtacgtctcgtacttgttgggggcctccgtttccaacacggagatggcgaaatcagccatggcgatcgggtcgtgaaactccgtggcggctcgcgcagtggccttcaggatacccgctagaccctgttccttttcaatagccacagcgtacatccgccagggcgattcaaatgcgcccgctaacgttatatcctcccacaaggaagggcgtttgctagagggttgcagatatggcagaatctttcgctctagaagctgggcggcttctgcgttctcaccgcgccagatgagcagtttggcatatagcataatcgcatgagggaattcgtctttaagagccaagtctttgacctgcgctatgccctcggtgtttcggtaaatgtccacacctggcgtgctgatataccggttcacgaggtgaacaatggctcggcgcgaatgtgcttttgcgcagccggtcaacgcccattggtagacgtggtggcctttttgaagatctgcaagaaggatcgagattcgataaatggcgtcgacatctataacaaagtgcataatcagtacagaaccatttaatccgtagcgtttcactgtataccaattgaagtctgaactcacctattgagatactccgaacaagactggcggtagggacctgcgagtgcgatagcctgatcaactgttcacccacggacacgaacgtcgccaagttgacgcccggcggtatgttactttcataagcttcatacattttgcgtgcaaattgcctgaactcagccaacgttggttcaacgtgcgcagtagagtgtctattccaaaacccatcacggtctattctaaatccatcttcggtgaccaacacatgctcgggtatcgcattctgtcttcgaacagatggtgctcggcgagaaggcctgacagctgatcgattttgagtggtgtggaagggtcgtttcgatgtagttgtgttgctattggtgacagctcgagtggtgcaaacttgcgcgccgtggtgacgcaagacatgggcttttggagagagaacttgatgtaatcgacaccattgtaacggcaaaatcaatggtctggccatgaaaacgagtgagggaaatcgtgggggtggtagggtgaggggaggttttctctgaagttttggagttcgggaacttcaccaaactgctccgacatttagatctaccaacctgacgatacgccagagtagtatttaaagatatttactgattttaaagataatagaatagcattgatatgctaaatgcatcaattaaccaaacaaaccctctgtaccagacggtctcagaacacaatgcgtataatgtacattttgccttgatctgccaggccaaacacaataaatgctcaacaagatctctcaaaagcaagaatttaaagagataaagagagaggaaaagaccaaagcaacaacatcctccccgactctcttcccaatctatccgctccccgtgcctaaataataacacagcttctactccatagtcgccttggctccgatcgccttgaacgtcgcaatgagcttctccgcctcctccttgggcacagactccttcagaatctttggtgcagactcgacgaacttcttgctgtccaccagcgacaggccaagcatggtcttaatctccttgatgaccttaggcttggaggtaggctcgaaggactcgagcttcaggttgaacagcgtcttctcggcagcggcgggagcagcctcctcctcctcaacagcagcagcggccgcaccgggggcaccaccagcggccatagcgaagccgccaacgggaaggtcggggatgttcaggcgagtctgtgcaaacattttgattagcaatagttcggacatttatgtcaattgagtaaaaggatgatgtagatagagaggtatgcacggtccgcatatcctgcttagaaacccatcgattatgtgtagtttgtcgaacgcaccttcaagctagacaccaggtcggcagtctcgagcagcgtcaatgtgctgatctggtcgacaatctgggagatcttggggttggtagcagcagcaggggctgcctgggtggattcgcatcgtcggctgctgggtgtgcgacgggctgtgaggtatgtagcggaggccccgatgcgcagggaggacgggcggacggagccggagagctgtctagcacagcgggctgcgacctgggtggagaaggacatggcggaggtgagaaagaggcgggaagctcgagagaaaggaaaattagacgaaagtggtggggattggaatcgcggctcgtcgataccaagaccgaaaggaaacactcgaggaaaatctgggagtggcacgtgatgtatagtgcctcaggcatcattgtctatctagcaggcaaacagggccgaagcaccaaacgtatgatcactcacgatattcttgtatgagttctttcattataagatatctttgtagtaatatagaaggagagcagagcaaagaaaaaaatactagaagagaaacgtagtccaatttacaatggttctcgaaaagcgtatcatcgtacgaagatctataggcctcatattatcaaacagcatccagaccctcatcgctcctttttttttaaattagtcctggtcccaatcacctccaccctgcggtggcttggggcctcctgcctgtctcgagacaatgatctggtcgacgctcagcaccgtccgggcagcctcactggccagacgaatcgcagacatcttcgtggccataagatctagaataccctcctcgacagtgtccagggtgccgtcagattcgccaatctcaaggtccacaccggtagtccagtgtggttcctcctcttcagacgagctgccctccccctcatcctcggaagatgattcgccaggggcagtggcgcggtggtgcgcagtgtacagacgcgagagaacttcggtggcatctagaccggcagactcggcgagtgtgcggggaatgacctcgaaggcctcggcgaacttgcggatggcgtactggggcaaaccaggggttcggtcggcgaagttggaaatgcgctcgacgagctggatctccgtagcaccggcaccaggcacgagacgggggtccttggtgatggccttgacgacgttgacgccgtcgtcgatggcacgctcgacatcctccaggtggttctgggtggcaccacgtaggacaatggttgctgtacgggtaatagcgttaacatcctcctgacggaagacagtcactcgatcaccgccaatctcggtcgtctctacaacgtcgatatggcccatctcatcgggcatgggggcacccaggcgagccagaggtgtggcaccgacaacgcggcacaagcggcggagctcgaacttggacagaatcttaatgacgaggatattgaaacggttgaggtagtgcatggccaagtcgccaacagtggagccagcaacgaccacacggaggccggaatcgtagagctccttgatggcaatctccagacgatcctcctcgcccgcggtgaagtccatcatctccttggcattcttcaggagaactgtgcccttggtctcggtctggctgatatcgatggggcagctgaaaacgccgaccttggccttgctggccttcttgatggttccatcgggctcccgggggaagaccatacccttcaccactttcgactgttccaagctaccacccatgatcttaacaactcgcacgttatcgacgttgaagttaacggggttcttgggcagcacagccagaaccgcctccgcaaccaacgcagccaacacgtcctccgtaccagactgcttagcagccaccactgtgcggagagccttgctcaactctgttgccgatcgcatatcctggagtctgtcgacctcgagctctagatggaatcagaaacggttccctcatttgtatatcgacaaaccaatcatgggggggagggggcaaaacataccctctagaaccgacaaggcaaagatctgagccttctcgtatccggagacaatatcactcgtcttgagacccatacggatcaactcctctgccttctttaacaattcaccggccaacacgataaccaagttggtaccatcgcccatctccgcatcctgctgctgactcgccataacaagcagcttagcagcgggatgaacaacatccagctcacgaagaattgtagccgcatcggaggtcagaatcatcttttgcaggtggttaatgacgatcttgttgcgaccataggggcccagggaggtctggacggttcctgagatagcctggcaggcttcgatgttacggataacggcaccatcttcagaatcgtggctgtatagcagaaaatacagatcagtcaattgctttgcttctttttggaggggcgccagataaggaggtccctattgcggtgggttttcgggcttcccgacttttcgaactcacctctggtacccggccttgaagagccccgcctgggagggacctggaattgatagtgacatgatattaggtcgcgtccggttgagatgcgactggatatcaaatgggttggatgtgagagagttggagctgttgtgccgggcaatttttggagctgcggtggtgggtttgcttggtttgcacgagggggagttgcccagggcttggcgctcagtatagatcagcttacgagcctaatccttcaagttttatatgtttttgctgtatattttatgaggtgtgttatggagatgctctcatgtttattaatacatcgcttaatggtattatacagttaccatcgctctattgatcatctcaaatatgagacatgcgaattataagcagtgtggaaaccaggcactagaaatgttagcagcttagtagatggaacgaagaaaggaaaccttactgtatcctttgatagagttgcatccattctcctcgtagattatgttggccttgtcgagcctatttagtcgaattagtaacaaatagggcaacgcagaggaaacggtcataccatccttgaatagcttccattcggttgtaactctactataagttagtaataaccccttcaaacaattcttcaaacctaccgatgggtgagtggacatgaattgtggaggagcctgtttctcctgttcatacatgcgagcccatctagcaagtatcagcagagcccaagacgatggcccattctatcatattgacttacagtttaacggcagcctcggggttgaaacaggctctggccatcatcactgacaacaatcattagccacataatcgtaagttgatccttaacttcaagggctcatacttagcccgatattgtctgcctcggcctgtagatagaaattagccaagtgaccgtatagcaaaaaaacagacaaaaaaaaaacaatacctcttgcgtccgtgagttcggcaagctatacatgagattcaaaagaaaagaagaaaactgcccggagacatcgaacaagaaagagatagcgaagacagctcctagggtaatgaaactgttgctcacacgctcagccggatgatgagccacaacatgagcaatctcatgtcccagaacagcagccaagccatcctcgtctttgcaaatgggcaagatacctgtgtaaacgaataccttccccctaagcgaagcaaaacaacgtcagcgatgtccaccatagaatccaaccatcaacaccacaaacccaacagaacctacccagggagcacaaaagcattaaccattccatcatccttgataacatgaaccttccaatcagcgccctcaatattcacctgcggaatcaaccgctgcagcacgccgtcaaccatacgagtaagaggatggttgtggggcaggatcttcccacgctcggaactgagtacctcgcggtagctctcttcacccatatttagctcctggtgacgagagacacaattgaaccgtcgtcggccggtcatctccactatctccgtgttgtatagataaagtccggatatccccacgccaatcgcaacaaagtggtgcggctttgcattctgcactaagcggaagacgaggggttggcgggcgctgcctcgaaatcggttgtattggttgcgtctttgttggtagggggatttatggcttgaggagaaggtacgccggttgcttgggcaaggtgtgggaaatgagagctgtgatcgcggtcggggttgtcgtagcagagagggagcccaacaaatagacagctgaggccctggggtattgtatgagcgtgacgtttgagctgctagtgaagcggccttgagcttggtggagggcttcggcgataagaaagggtatgcgcatgcgctgcgaaaagcacgcgccatagattgacggagcatggtcgagaacctgtctacctctctatgcaaatgccgagaaggagagaattcaagaacttgcaatgacctaggtaaaccagaccttccccggggaagttgcatgaaggttgaactgagcaacacggcgataagcagccactctccccgttttcgtgacatcggggagcaacgtcatgtctccagaatccccactctactatgaggatatcctagtttcttcttcaaatttagtcttgacatagtttaccgttcctctcagtacatacatagacaggcctacgagttgattcacctaagaaagaacagtttcgatgaggtgggtatgtactaatccaaggcaactcatagattcagtctagcaaggctggatgtatagaaaaagaaaatcaagtccggtaaatcgtcatatgttcaaacaagttaaaaaaccgacagaaccccatcccacccgcgcaccatagccgagaccgtcagcaattacatagaaacagagatgttatgtccaaatacagcggaaacacatcaagaacaaagcccctggtatcatgttgggtagtcatgggaacaaagtggtatcatagggatggcaaaagaaatcgcaaagggggaagaaaaaggggaaataacacgtcgactcggtatgtaaaagtcaataatgtaagacaaaggaaagcgtttcaaaaaaaaaaaaagtcaacacgaagaaaaaaacgtaaggttatagagagttaactccctactcctccgtcaaagcatcgtcgccagtctcgcgccagtcttgggatcgctccgtcaaccgacgcacaccggagacacgctgggcccagtgggcttcggatggagtgcggaaggtgtaggcgcgctgcgaggagatcacaccaatgctttgtagcactgctttgcgtgaatcacgcccgaagactgccgggtggttgatccactccatggacgattccagatctgcgttcagggcaatcatcgtctgagtatcgaccgcggagggtggtgtgatagtgttggtgtcggatgcggatgaatgggttccactaaaggtagatgatttaggagaggaggccaagactggggtgtcaccacggctgtcggcatcgctgtcggaccgggaagcacccgggggcagcggtggtaggccacccttgcccaggcccttgagaatgctgcgcgtttcgctgagaaggtgcatcgcgcgatcattctggccccgagataccagagtgagagcacgggtcagcatgtcggatgttagaagctccatacggcgctgcacaatcgaggggtggggaggaattggtggcgtaggggatcgatggcccttggcccgaggattaggaggcagcatagtaatggccaggagtgaaggtcgaggggagtgcgtgagatggccatcacggaggaggtcgccgtaggttaaatcagcctggatcaatggaacctcttcaacgctcatgactcggctatcatcgccatcagaaccgccgccgagagcctccaatccggagactaggctctcccacggatcctgcggcatgctgtcctgcgtggcattgtcaggctggatgacaagttgaaccaagacgtcgcgtttgtcaccgaatcggagatcacccagtgcagcttctgcatctttaccagttgcacgctttgtggtgtgaagagcgccgctaatcttaacaaacttggcgggtgatccttcaggtaggcggagcttcaacttgacgttttggtgggaggttgtctgcaacgcgcccaggcatccagcaacacattctcgcaacatcatccaatcctttacatacaagtaagatcccttagtacgagtagacaactcaatcatggtatcaggcttatgggtcaatccaagtccgaacgagtggatgttgaccttggcagcttccgcgcgggagaccacgaaatcaacgctttcggggtcggaaatagaagagtcgctgatcaaaaggatggttgagatggggttgttgaatttgcgctgcatcagaagatccatggcgacattggcaccttcaaccacgtctgcacggagacttttttgaccaaccggccgaatcgattcgaggatcttcgaccatccagcccagggcttggtggtcataccaaccaggggcacacctccaccactcgagccaaaagtcacgaggcccatccggtcccgagggccgagattctgcacgaggaatttgagggcatcacgcaggagagtaatcttcaagccttgcatagatgaggataccggaattaccacgacaagatcgaggggaatatgaatagtgttgattgcagggaattctgattcggggttggtgtagtctgtaatggcggtattgatggattttgctgcgccgtaagacgaattgatagaagcctgtcgttgaattccacggttaccacggtagtcatcgtcctccgcccccgagttatcatagtcatagtcattttggcgtgaattggcttctgggtgcaaatcgatcaaagaccgacgccacgtcttcagctcgttgcgattcttgaagcgaaggtagaaacagggcagctcggtgacggaaaggttcaaggagagaacaggttcatctggggacacctcgatggactttaaatgcttcttaatcaaaattgagcccttgagactgcaacgaacaggcttgcgtcgtccggtcgcatcgaattgggggtcagatgattttttctccttcacacagataagcatctctttgaaaagatagcattctaactcctgccaggaatctcgatccttgcccacgcgcatgtgtccgtggaggcgcagcttgccgaaccggttgaattcaagaccgtgccaattgtccacgcggctgcgcaattcctcagccacttcttccatattctctgttggctcatactggattgatcgagcatcctgtccaccacctgatcgtcccgcgtagaccccatccggctgcgattgccccgaaggcgtgtgtcgtaggtcatctaagtccggacgccaattggcatctggcacttcgaccgtaatcagacacgtgagggtctgctgttggcgggatctgttcaaagtcgggaactcgcttcggacggtgactatcggcgcgggaatgggattcttggcgaccttagggcgaggactgaggtctgactccatagcctgtacatcataatcatggcgccgtccagtgctggtgtgctggccttcattgtattcgcccgatgagccggccgcgctaccattccgggagtggggttgacgaggattagaggccacagtcaatcgatctacgcgctcacgctggctgctggtatcacggctatctcgccgactatatgatgaatctctcgatgggttgtaggattgttcttttggtgaggggtgataagatggctccctcgttgaagggttgtagggtggctccctcgctgaagggttgtaagatggctccctcattgaaggtggctccctcgttgagggattgtaaggtggctctcgggtacccgacgtgtaacgactgccggtatcacttggtcgtcgacccaactgttgctcccatggagttggtgttgtcaagccactgcgtactgtagcggtatcattcgatgtcactgagcggacaatattactgattttctctggggacaatcacattagccttctgagcccctctcaaccccgcgcgagggacgtaccgatatccaagacatttccaccgcgacttgtgtccaaggccaatggcgcattgcaggttgggcagtattgaccatcgcattcccgcagaaattcatagaaacaggcctcgtgggagacatgggagcacgagagctgcaaaacacgctcgccgcgtagggtatgctccaagggttcctcgcagacggcgcattcgctcccgacaaaggtccggtccctccgtgtgtgggtgcgatctacctccattgggccggtggtccgtcccgaccttgaatgaaatgatgcccgagagcgattggaatgcgcagattgaccagcgagttccgggtaagcagaattgatctgtccggcgacagtcgaggttgctcttgaccgggtaagatcggcctggttggaaagactgctgctaggtcggtctatcacgcctcgagtgaacgaacgaaatgaacggagaggtgaacgagaggatgattctggctgcaattgaaattctatacgtcaccggtatccggttagcaagttgggacctttcaaggctaatagcagattgaggtcgaagctcaaggattgaagatgtggatagaagagagaataaaaaggcgcaaaccacactcaggggagagtggttcagtccgacctgtcccatgaggcatctagaaccggccacaatagtctcagatctaggacatttggccctagactgagatactggaagagagacacagaacacttacttttgggctttttggatcgacctaggagacccagctcagttagatgttgttgagttgagtcggtcccagagttgtcctccgatctaagtgaacgtttccacatcgactctcaaaggaaacaaagaggtgggggggaaaagaaggaaaaaaaaaaaaaaacaaagcaaaaggagatcgaaaagtaatcaaaaaaggataataaataaaaaaacaattaaagccaaatacaataaaaattaaatccaggcatttcaagaggtaatagtggtacttcgtatacaaagatgaagaaagatggagctgaacaggggggtacacggagtatacacaacacgttttagagtggacacatggttaactgaaagactaaaacagaaagagaaaaaaagaaaaaacaaaaaaacaaaaaagaaaccatggaattggtcaagatcttgggtaggacaatagtcccaccctcaaccatgggtttggaggtggagatcccctgaattaattgaatattttacagtagttggcgctactgcaccccttattatccgccttatacatagtgaacgagtgatatctcttcttattccatcttgcattccacggctccgtgcagagggtgaggtggtaactagtcaatgggtcctcctactccgtaccttggtccttcaatgcaattgtggtcctctcggggtgacatcggatatccgatcggctttacaatccgcttacaacataggggatctgatcctggaatcgggtttatttaatttactatggagcacaaatggagtagtacctggattatattactataactattatttattaacctttggactgattaacctcttcttctgcatcttatgttcttatgctataccttgactctaaatctggcctctgtctgggttcatcttttccatggactctagatacccaaatatttggcagatccaccaacctcggggaattactccagacgttccaaaagaacatttgacatctggatccgtgagtggtgataacaaggttggctagtggatttacttcggatcggattaacttggcatacgcgggactaagtaccaatcagtcacgtgatcgaaagtggctcatatatccgctagtcgtatacccactcaatattggctaaggaccacgcgcctggaacatcggacagtggcaagtttctctgtcgatccaacggcttcccccctgtcaaaaggtttggctctgaagaattatggaaaccggagatttatttttttgtcaggcaaagtcattctgcaatgacgcaatctctcttcaacttcaacccttccagggtttaccccagctccaagctctccctgctgtcggtgatcgacatctggatcatcaacaaaattggtcgggtccggatgtcgtgaacgcagtggcgtctagacgcacctccggagctttgacgatcactccttcaacggactccaacggaaagtttatgtcatgagcaacatgacggagtggttatgacaatctccctagctcctaccacaactgggtcaacgaaaaagcccttggcccaattggtctggctcatcttcgctttcactcctgagctccctcgtcacgtctgcattggactccggcgggtctatcctgttcgtcacgctcattagcgcttagccatctgtgctaggaataggagaggcgaagctagaagaaattggcttgcacatcattgactgtagctcccccgtttatggatcataccggctgccggggtgggtacgcatgttgtctacgcggtgatcgacatactcctgtctttttggatactgcagagcgtctgtgcttactttagctacttctccactgtctcagaaaagccgtctagacacaacactgactactccgtacggagcagtagatgacgattggcaacgcctcccccttttgaggtggaggtttgctattgtatctattgcgaactatgcatgtaggcacgccccttgtgctggtctgcacgtcatcctgcgtcggagaattgtcatgcaggataatcgagactgcaacggaaagtggagttgactggtaacaactcctcactgctcgtccctgagctgtcacttagcatacatatccggctattttctgcattcttacaataatgatccatatcacgatccacatatatgtactttgtacacgaagcgcatagatcactcaacgatcatgaccgttgaggttttcagagcggagacaatgtaaacacagtctaactccttttagcaggttgatcttttctctcctcccaattctgaggtacctatgaaacactggtttcagagtacgagctggtcgcttccttagtgcgttacaagttggaagtggctcaagtggcttgatcccgatgatacagggctgcgatatggcacgctcctagtttgtgcatcgtaagttttgaaaggcgactccctggtctttgaatagttgtatgcagttgagttatttttacgtgcaggtatatgcaagtggatgcatgtacatgcaggtctcattggccgggccgatcccgagacctgatgatctctagcgcataaaagactcaagaccttgaggttttggtcaactttggtaaatgcagacttgcagctccaacgtagcaacgaagatatagatcctttcgggttggctaactcaaagccgacttctatcaaacgtgtgatagacccgatctatagtctactgtacctgaaacagatcgtctatgcaagtgaacgcttcaaatccatgaagggctcctgaacacactcgttctcacacatatcgactcacacaaagtacataacgaggtatctcatggtcctacgcgaggatgtcttggatcctatcagcccgggccactaggattgtctcagttgaatcaacccattatcttatttgcaagacttagcatggccattcgaataaattgtaatataagttaatataatttatatataaacttgagccaatgcgcgaactgatggggacgtagcgtcattcgtcagtccaaccccatacaacttaacgacgtctagcgtttttttttttttggatctatcgctttcgtacttttgcagcaaggtaattttggacatgtctatcgtttactctgtactatttgtgttgatgtttctgacacgtatcttcttagtattagtcaagataatatgacatgtctgttcttgtctttgttcaacggctttaatcgtgcctctgtgatgtgtcgagttcatacttgaaacagtctatacaatgtttggcgtaacaacgctcacgcttgatgcatgggtgtcgtctgattggtacggcagaattgtgttatgtagcccaaagctcctaatcaactctgacttatactagtatggtcagtatagatagattcgaagttcagaataatcggcttgggtggtttcatgatctaacatagagaatgtgacatcaaacaaggtgcaaatcattgttcaactaatgcactggctagttcattggtttttctcatacgacgagctttttcaatcttgaatttgtcggaaacggcatgcttgagcaattgcttcaagaggattctctttatgactatccatggatggaatcaatttcggctttgggtgagtacatgtaggataaacacgatccatggccacactatagaatgcctgaaataatcatttacaggaagtaagagatatgaatgtattgtttcatttgataaagacaagcaaagatcaacccttgcccgagaagtgtaagtgcactttctcaaagctttggcgaagatacatcaggtgctccaaacctcggacaaagaatttgggcatagaataacatgtctaaacccatggagagagaacgtccgccagatctcctcatatctccatgaataagagcccaattcctcggttcatttccctgcatcaaagcatccacagaattctctctcgcagctctgactcgggtcggccggtcatttgcatcatcaggccaatcgactcctccactccgatcctgactgtgcggacttcttcgactctgaccacataacgcagtccatcatcaataacaaactcatcttccagtctgatcaagccttggtagtgagcgctgactctgtgggcgtcgagatcatagaatgcgcaattgttgttaactgaaatcgtgccgtacacgcgaatagttactttgacatccgggaagcctttgaagatattggcaaaggttggtccgtcactggtgatggagtcccagtggttcaagacaaacatgatgtcgaggccgtaggttcggccatacacgagtatgtcggtcaaggactcgaacgagtcactatcaggctgcagaggggtgatcgatttatgaatcaatgggcagtagcagtaggaacggccttccagcttcccatacttgcgcacatactctgcctggagctcaatcagggcggggcgaaggtagtacttcagttggtcagggtcgatacgtgcggcagggggagcgccacgagcaacgaacacaatcaggggctctgcagtagtgatgggggggccgatgggaggaccggtcacaaattctatggcagcgggttccgccatatcgagatcagtgttacttgatggtttgttagatttttgaccttagatagaggtatggtacaataataccttagtcacaccggttcagaagctgatgcagagaaaggaaggacaatgagggggaaagcagcatcttaaacagtaaggctcggcgttcattgctcaacatgcgatgcgtgaacaaactgtactgctatgtggagggtgaataactgaagtcaataaagccaatagagcatcctcttggggtcttattgagctaaggatatagattctgaaaggctcaaaaggattagggagaaggctattttgccttttgagcctgtcaatggttattcctctcaatagtcccgaggttgacatcaattgccttttgatattcatttgggagtcttgtcatagtaaaagcatacatatctcggaatgtagtatatgcgagtctgttcttgtgactgctactgtaattatttatcaggttaggttcatgttgttaatagctcagtcactgatatatcacagccttgtatatattctgctttacaagactatacattgtttgtgaagcttgttaaagacagaatacttcacctataggtattgaagaagtaactagtcctctagaaaagcttgaatttgatattcctatcaccgaagggttgaagttgcgatgttatatagagatgcaccgcaccgtggagatatcggagatcaaaccccgaatagagtccctagaggcagaaatgccagttgttagtcgggaaaattcatcgaatacccccagagacgttgccaaatacaagaagacctcaaatatcacagtattcatgttcagagagcgaagtactttcaagcatcggacccggcctgacttcgctcaccgggcggccccgatctggaagctgactaagacggcaaaagtgaagagagttgttgggaaaaaggtgcatcaccttcaacataccatctccaattcctttacaaaatgctcttccgtgccgcggtccgtcaagctgcgcctttgaggcgtcatgccttcactcctcttgcccgtcgcactgttaccaccgacgcagcttcagctaacgtcgagagcccactgcctgatgtatgttagccctatccggaaaactgaaactgctcaatctttgtagggtttccattgctaatgcttgcgctataacaggaggatcacaagctgttcactgtccgtctctccgatgagagcttcgagacttatgagctcgacccacccccgtacactctcgagacctccaagaaggagctcaagcagatgtactacgacatggtcgcgatgaggtacgataagcatggcatgggatctttgatgtttgagctagccgctgactgactgtgtgttcttttgcagacgtatggagatggccgccgatcgtctgtacaaggagaagaagatccgcggtttctgccatctgtcggtcggacaggaagctgtcgctgtcggaattgagcacgccatcactcgcaaggacaagattattaccgcttaccgctgccacggtttcgccatgatgcgtggtggtaccgtcaagtccatcattggtgagcttctcggccgccgtgagggtatcgcgtacggcaagggtggttctatgcacatgttcgccgagaacttctacggtggtaacggtatcgtcggtgcccaggtgcccgtcggcgccggtctggccttcgctcagcagtacaatgaggagcccaacacctccatcgtcctctacggtgatggtgcctctaaccagggtcaggtcttcgaggccttcaacatggccaagctgtggaaccttcccgttctcttcggctgtgagagtaagtcgtttcttccaagtcttaatagcatcaaaaaagtccgcagatgtactgacgctatgttcttctagacaacaagtacggcatgggtacctccgccgcacgctcctccgctctgaccgagtactataagcgtggccagtacattcccggtctgaaggtcaacggcatggacgtcctagccaccaaggccgccgtccagtacagcaagaactacgccatcaccggcaacggacccctcgtcctagagtacgtcacctaccgttatggtggccactccatgtccgaccccggtaccacctaccgcagccgtgaggagattcagcgcatgcgcagcaccaacgatcctatcgctggccttaagcagaagatgctcgagtggggcgtcgtctccgaggaggagctcaagggtctcgacaagaccgcccgtgccaacgtcgacgccgaggtcgctgaagctgaggctatggccgtccccgataacactccccgcatcctgttcgaggacatctatgttcgtggctctgagcctaagtggatgcgtggtcgtactgtcgatgagactttctactactagattgttttgccctataggcacttctgtgcatcatggaagagctttttaattgttgtgtgaaggctcgggaagatattcttgcgtcgttctatcatttatctgtaatttagcccgatgactgtttcctcttatgtttgtttacttgtttcctgttctagagtagagagcaattgccatcggctgggtccttttcaagttcagtacatcaaattttagcaagtagtcttgcaatatcttcatcaggaattttaaacaagccttggttagcaatatcagccatcgaagatatataggcacgccgtccttcgcagtcgattatgggtatcacatcaaaaagaaataaaaaaagtaaaagtacaagcaagaatagaagggagacaacaagccatgtctagaaaaagtaccaaagcaaggctcaacctacatcaagcaggctcttgtctcaacatttcaagaatcaggtcctgagtccgctgcacagaatccaatttttcttccatcacaacacgttcgcgctccaactcacctcgaaactgagcctgcatctcctggcgtagctcttgcttcatttgctcaatctggatgtgactgagaccttgttcctgcggccgtgactgttggtgctggtgttggtggaatgcaggctgtacctgcgagtgctgtggttgccgggggaaagccagaaccgggggttctggggcagcttgtactaaagccgagatcatgggtgaggcggcactggcgtctatatcgcccccggatgcggcctctaggtgtttgttgagttttccaagtgtttcgatgacggctgagactatacggccgtcggattgtggaattgggggtgtggagggaagaggtgcagtgacttgtggggttgagaacatattctcaaaccccggtggtagtttcagtgagctgatcgcggagacaggtgtagagggcgattcgaggaaatgcgcggggggcgtaggaccagtaatcgagggcgagggtgtagggctggtagccgggagggcagtatcaccgacggtatccgcgacaggctgatgcatcatatccataattgaggtattgacatcagtcgggctagtaacagatgacccagacatgttccgccatgggtcctggtctccattttgagaattctgccgccagggctgcggctgtctacgtttcttgagctcgtcgcgctttgcaatgcgtcgattctcggcttcttcccaccgctgccaggtcggaagccaagcatcgacagcagcgagccattgcgggttcatcaattcctcggccgttgagccggctgcgtttgagacccgctgtcgctggtcctcgaggaacttgatgcgctgccttgtgaccatttcgactttgcgccgcactgagtgccacgagtatgagcgcccctcatggacacgcttgaactcggcggcgatggatatccaccacttgcacagattactgcggctgccgaaggtccctgcattttggttgcagatctcaaacagcactatttcttctttggttgtgagacgtctatgctgccgtgaagtgtcaccatcgaactcatcgtcgccgttgtgattgcgcttcgtgcctctgttggtggttgatcctgacatcagccttgacccaactccttcgctggtttgagctacgcccaccggcatcggcgcatagtatagatcgctttcgacgatgcctccttcacgtgagtcacttttgattaggtttgcccctcgatgtgtcccttggctgctctgtgatgcgttatcggtcgtatgtggatgcctcactaccacggactgggaagctaggctgaaccctgagcgcaggtctgatggtactgtcccgaagtaattttgtgagggataatgatacgaaggatggcagtattcgtgtggttgaatgcgcgtcatgagcacagcagcttgcgcggtggccgagcagccgctgtgggagaccaacagtgcacgttgggtggtctattggcccaggggatagtctccctagttcaaaatagccatcaatagggtggcaatagtgtagcagaccaatgcagaaagtccttgtcgatctgtggggataaagataaagctgcgatggatttcacctgagggttttccacgaggcccgtgcgccgagcatagtatggcagctctggctccgtacagtcttgtatctgaggatgagcttcaatcgggtcatttgacaatttgatcgtgttttgattctgcctaattatatgtagctatttgaattctatagttctcataggatttgagtattcatgtgctgcacatttatactttcgcgatgtatatgttggagcttcaaccacctctaggtacctgccaacaagttctgtcatgtcctcacaacttcatgtgaggctctaatagtttttggggaaccagaacttagtacatcaagaataagctgctcgacatatctacctataacaggtaggcaaagcagccaggtctacgcaagggtcataaagtgactggctaatatgcagcatgaaacatcaacatcaataatatatccatttacgacacatcatggctatggtggtacagggggtggggttgacacaaaaagctccaaagacaggcaaaacaggaaccaacaccatggtcaacatgatccagaaatatgcagaaagggaggaagatctaagcgcccactaatacacagatgggaagtttagggggaaatagtagaacagtagagacaaacgaggaagggacaggctaggcagagaaagacaggccaatcgaatcctctaccaccgtctcctcaggtaccagccataagccggagtggcaatggtctcgccgaagggagtgggcacctcggcggaaccgggacgggccaccgggtggcgcaggtacacggctgcacaaatgttctgattgacctcgaggtagcgcgggatgaaggcaaaggcagacatgtattggcgtggttgccagggggtggagtaggtcttgctgttgtcgagaggattatcgcgcatttgagtaagagcgcgcttgagcgtctcgaactcttcgtcgctgagttccgaggcatcgacttcattacctagtgttgcctgcgagaaggcttcggagagtttgtcgcttactgcggtttctgtatctttcctggcggcagccaattccctatctcccttgtcggatgcgaaggcgtcttctggacggagtttcacgtccttattgtctggcttcttctcggcccgcttggccttgagaagcagggttaattgggaaaactgggcttccaagctgtctgcgaggacagtgctggactcggagcgggacaatacgcggcggacagcttgttggaagccacggagctcctgcttgcgttggggcgcgagtgtatccttgccggcagacatgatagacttggcctgtgccataagcgccttgagagtctccttaggatcctccttttcggtctccttggcctcttcctctgcggtctccttggtctcttcctctgcggtctcctttgactccgcctcaacctcttcctctgaggtctgtgccttcgcctttctccgaaccaatcggccctgacgccgctcgtacgcagtcttcgtatgaccagtagcgtacattacgcgctctggctcaacctggaaaaggtcaccggggttgaggagatagctgggatgtttcatctagcacaaaagcgagtcagtaaataaggaatcggtagcttcccacgtcgcatcataccttttgcccgttaacagtgaccgctccgtggatgacgaactgtctcgcctgtctggcactactagcaaagagagctcggaagatggctacatccaaccgacgctctaggggcgcaaaggtcatctgggtgtaaggtgtaggacgtttctggtaagcgggcttgccgcccatatcgagtcctgagccgcgaccggatgaagcttgggaaccgtcatcggcggccaagtcggatgcattcatggggataacactgcggatgcgatggttgaacatgcgtttccactgtccctcgcggacctgctcgccatgataggcacgggaagcagccttagcagaccatttctgctggaagaatgtgcgattgatggtgggtgggctgcggaatcgttgcatgttatacaggttgtatttgctccatgattgacggattttctgaacagtgtcttgttagtcttctgacactgggggaattgagtacagtgtagatacatacgcctttcgacaaagtattggtagctctgttcctcattatggcgattcggtaaacacaatgctgtagaaaatgatatgctttctagtccgaattggccgagtctcaaaacttcagagcacgtgactgtatggtattaatgccttaaatttcaggaatcaactgctggttggattcgatgtttgcctggtttgcatattatgtaaggggatcctcttgatgattggtcaatcaaatatcgcttgatgccaccgccctgtatgaatctgccaccgccccagggaaaaggtatataaggatgcctcccccccgggctcttcctctttttttttttcttcttcatacttaccttgtttgggtgactgtgatcaataagacggttcaccacaggctggtccctgcattgcacatcgcggcggaacagtttgttcaatggcactcgtgtcattgacaggcgtattctttggcacctccattcgtggaatatcttcttttcatcaatccttgagccagtggcacgagattggagacgagtaatgtactagttgatgcgttgtagccacacttatttgtaactaagtgaggccatggtgtcctaagcctgtctaccacgcgtgaaatctttctcgtgaaatgttcaagtctgcccccatacccaatctccccttctctgtgccgaccccgtggggcattctggtccttcgatatcatctctctggcacattcccgccatgtcgtgtcgcacctgccatgcactatcttcttttcatcaatcctcgagccagtggcacgagattggagacgagtaatgtactagttgatgcgttgtagccacacttatttgtaactaagtgaggccatggtgtcctaagcctgtctaccacgcgtgaaatctttctcgtgaaatgttcaagtctgcccccatacccaatctccccttctctgtgccgaccccgtggggcattctggtccttcgatatcatctctctggcacattcccgccatgtcgtgtcgcacctgccatgcacatgatttctttatcacttctcccttcacagctgaaagataaaaagtccggtgaagcattgagaaagatgtctactactgttgcaacttgccgctcacgtttgtcttaaatccctcccactgaagatacgtataccattcctgatctcttgaatgatataaagtacgaaatgaaattgtttggtatatggtacagaaaatattcttaccccctagacaacacatcgcgccatgtccaatgcatacaaatcccagtcgtacaacgttaagcatcttccctatgatcactatatcactctctcctagtacttgggaaagcctccgctaatgagtccgcttcttgcggattagtccattcctccagtagctcatgtgccatatcaacggtttcatcatcgatgcctgcctccagcacggtaccatcacaaaaggccaagcgggttaacacaacaaggtgtttctgtttgctgccaggtacgcatgccagtttctcctgcatattgatcaaggggccgtgtagccgcatgacaccgaaaatcagccgcataaggccattgactagcgcgacacgtaggtctgactctggcggagatgagtaaagtgcatccagctcatcatgcatcgaccggaataaacgagcgagtgcattcgggtgcaaggccaggatcgtactggcatgcctttgggattggcccatagggttgaatgccagtgactccagcagcagtaggacctcgaggcgcattgcacaaatgtcgcatgcagtgtatggctcgacaccttcgtccggtatggcgggctcgctcagcatatgcgtgaggcggtccactatccacttttgtacatccaattggtcctggtcagagttcctgatcggaccaaaagaatctgcacgaatacttgttgacaggatgttcatcaaaagcaaaatgtcacccagtggatgtgacgggtgcagcatcacgagaatgaacgagatccggatattttgccaaaatagctccattgcacttttgatgtgcagtactccacacgcgatttggtaaagtagacgcatggccccagtcgagtcgactaggggctgcagatctgattgtggtgtctgtcgagcaattcgtttatctcgtgatgccggggcgtacttgaagcgaggaactgcattgacttccacggtgtcctgcaagactccaactaaaggtgtaatcagttcggagagtggcacgtcatccgacatcagactatattttatgatagcttcgaaacggggaatcggctcgtagaacttctcgttgatggcgcgctgccacagtgaggcgatcgcttgcgtatattctaatacgtaactgctcgggtcagcatggcccatgatctccataatgaagctggacatgggttgatccggttccgagggaaacgcaagctttgacatggcttcgagatccgtttcttggttaggatgcatacggtgactcaaaagtcgcatcataaatcgctgattgcgacctgcctctgcagacttgcgcttcacttcatcgacatcggccgaaatatcagtcgcatcagtcatgacaagctccccaccagcagtattcagctgtagtggcacagggctatcctggcttgattgccgtttacgttttcctggaactgtcggcgtggctcgcttggaacgtgctgctgacttgctgggcgataccacggcgatttcatcatcgtcaaatccatcgcggagaggaagcacccgggactttcgaggagtcactggggcttccatctcgcgatgcttggatttgtagttccgaagctggtaggcttcatccacaaggtcttgctgaagaaatacattctctgtcgccaataccttgccttcggacatggctgcctcaacctcttgcttgtgtttcgccatttcgtcggccatggatttccgtagagccgctatttgccggtcgtagtcttgtgtcatcgctgcctgcttccttcgaatgatcgagatttcaccggatttcgtttccacttgcatcctcgcatcggctagctcctgtaacatttgttctctttcttgctccatctacaaggattgttagagtttatacaaagaatctttcatctaacccacctgcgccaggcgtgcattgatctccgcgggggcgttcccttgcgcatagtactcgtccacatccatggcatcgcccagctgctcgttgaccgcaaatccaggatctgtagcgagtacatgttgagcatgcggaatgacatgcgaattattgacattatcgtacacctcggcctccaattcccccatctccagtgtattgtagtcgtttgttaacccggtgtggaggcgaggcggcggtctaaacggtccagcattgttgtttaatggtactgcttgagtgcgtagcacggggttgttgtttatggggtttgggcggtactgtgaggctgacgcctgcgttgctttaaacgcattctgttccagttcatacaacttccccggtggcagggagtcgaactcgtcggagccgtagtcgtcgtcgtcgtcttccatgcccccgccatgaatggactaccagagggagttgacaggttccaacttcacggaaggcttttgatcattctcgagttcgagcggttccgagtgtggaagaggagagagcacggcagttcaaggcacctggacaacaaccctgcacatccaatttcaatttctagtcacgaacgtaatatctgaaggtcaaatgatgattgattcattaataaacccgaatagtacaccagatagaaaagatataaaagatataagcaaaaaaaaaaaaaaaaaaattgaacacggggctggagctgaagctgaccgctctcggcacttcacatgagctcatcaacttctaatccgatagtcctctctcgctctctgcacactccacttctattgcccagactctgtttctggccccccctttttgacatcatgtcgaaatctcgccgtaacgttaggtttcaacaccggtcgaatgatgagcgacgccccagcgtgtccgacgtcagcgatgcaccctcagagcccactagccccagcaaaactggcaacgggtccaacccatctacagtaactgaacaggttggttttcagtgggctgtgacctcaggatctaggtctgacatgatcttcacttctagaaacccccgcagtccgaatatgagaagaagaagcaaaccttcatcactcgaacgatatggacttttgtgatgatcgccggtttcttcgccgcgttgttctccggtcacatttatattattgttctaattactggcattcaaatcgtctccttcaaggaagtcattgctatcgccagtatcccaaataaggagaagaacttgcggttcaccaaatcgttgaattggtacttcctggcaactactatgtatttcctgtacggagaaagcgtgatctactactttaagcacattctacttgttgacaaggtgctgcttccattggcgaaccatcaccgcttcatcagcttcacactttacgtcatgggtaagtatctcgattgttccccttttactccactaacctcggttgataggattcgtgttctttgtcggatctctgcagaaaggccactaccgattccagttcacccagtttgcttggacccatatggctctctatctgattgttgtccaagctcactttgtcatgaacaacattttcgagggcatgatctggttcttcctccccgctgcgctggtcatcaccaacgatatcttcgcctatgtctgcggtattagctttggaaagacgcaacttattcagctctccccgaagaagacggttgagggattccttggcgcatgggcctgcaccgttgcctttggttatttcatgaccaacttgctgatccgctacaagtacttcatctgtcctgttaatgacttgggatcgaatattctgaccggtctggagtgtgttccgaacccggtcttcacatcgcaaccttattctcttgaaatctttggcctgaacaagaccttctgggtagcacccattcagttccacatcttggccttcgccactttcgcttcgctgatcgctccgttcggtggattctttgcttctggtctgaagcgcactttcaagatcaaggacttcggcgagtccattcctggtcacggtggtatcactgaccgcatggactgccagttcatcatgggcttcttctctttcatgtactatcacagcttcattgctgtttataaggccagcgtgggtgatattatcgagaccgccatcaacggtcttacggttgacgagcagctcgaggtcgtccgtggcttgggcaagtacttgtataatcagggtgccgtctcagaatcggtatgttcccttgaaccaattaccgtgatcgtcttactaacctctcctagattctggattgccttctcaccgagctcaagcgtcgatgaacttaaaaaattgtacggcattcagattgaaaacaccacacaaatttatgacactcatatttcactttcactctcaccattcgaggacgacttttcaaccccgcgcttcaccctgcaactctcctccgattgcttctgtgccgacgaccccctactcttgcttcttgcttcattcgggacttgatttaggtctaccgaatatgcatgccatccttaatgcgtgcatgcatgatatgtacatacatgcgccccgctcgccttatccgcctttcaacacggcattaacactcaacaaaatgacccgtgtcaagggccctaatgaacggtgtgaatagcgaaagtctcccacgccggaggcacggggacaactttttcattcttcatttacggctgtttccctgtacttttgttcagtactcttttttctattctattctattctattcccttcttttttttattgatgtcggggcctggaccgaacctaaatttgatgactggtgttgctcggtccatctggccaggagctttgctacactcgcgatgcgtggaacagacacatctctttacagaagtggtagaagaagggggggcatggtatgtgtgtgtgtgtgtgtgtgtgtttctggcaaatgtgcctctagtctcgctgtttttggacgcgtcaagacaacaggctgtagatctgtacatggctttcaattcagggtttgaagctgattcttaattttctttcactccatatttgctcctcgagaatgcgttcgtgggtacagcaaatatcgcccactgtgttgtcctagaatgcgaaaccgattatcggtagttgagggttcttttcattgtatctatcatatctcgtcgctggtcatagggtgtctgggtatcgagaaatcgtgggaaagaggatcatggtagaaaacttccagaatgtgaggctcgtgcccgagacaacttagttccgaaactgtagcgcaagaaacagggcgtttcgcctagtccagaaaagtggacaaacacctgatcagaactgagcaaggatgctagcgtatcccaacaagagtccggacgagcagccgatagcgagtcaccgtgaccgaagcattgttcggttgaaactaagatgggatatagtatatggggaccccatcccagctcattatcaagctatcaacccgctatcatattatcggttcacggaaccaagcaaggccttttctggctgtgcttcgctgcatgaggcacgccaggtgccaggaacacacacaaatagcaagaacatcttttacccgtcgacttcatattcttccatttcgaccttgaagtacgccgcgacctgtcgtctttcctcatctgcacatgcgggatcgagcatgaatcgaacggcagcatcacggcctcgctcgcctgttctctggcggtccccgttcgcagcaattggtgttaagggatgggcaggtcgcggagtatcttggccattggcgctagtgccgttgaatggtttgcgtggctggccgatccacgggtggtagcgcgggatattgtgttcgctggcttcttggttgagagggatgcggacttttagaaaccggtctgctgggaattccgagccgacggcggttagtgagcggtggtgggtgtagagttctaagaggtcgaagagggtctctggatggttgttaatgtggcatctaagtggattgaatgcgacaacaatacttacccatgatttctgctcggctggtgctccactgagcatagtctagccccgactccacttgttcgacgcgctgatctaatagtcgtcctgcaagctcaaggcaggcaaaggccatagtcgacgagttttgtttgatgggtgcaaatgtgcggtaaagatccgacgaaatgcggtaggcaagattggagacttcggagttctgtagcagtccataatgccgacctagcttcatgagggtcttgtgaggatgccgggttcgaaagtcaaaaccagaggcctctaacatgagtctttcgagaccgataatgccgcgcgcatgggcttcgaacatctggcgacaagcgttaattctctgtcttgtgtcgtctgggatcatgacttacaggatcatcagccgataagtgctccgagggcgccactttcaagttgtgctctgcgcagacaatgtctcgcgattttttgagcgtatcttcgatcttgcatgctgtgaacaaagccgcggccgcagcatcctatatcccgggttaggctgatctccttgaaggatttccaagtgaactcactgtgaaattatactcattgtctggatgcaccaatcgaaatcggtggtaatatccaactgctgtgtcaaaggtgcgaatgggactggatttccagtcagtcctgatgcattttgcttggcttggagtcaactcacaggttgagggctctccgtacgctgtcgatccacgctacgccctgaagacgcaatgaagtctcgcgaaggggattaacgctcatcgcttcgatacaattttcaattgtctgttcgaatatatatggattggccacctgtataaaagacgggtggatggccgggggtgacaggccagattccagtgttgagctcccgcgaggagactcttctctcgtatttgatgtcatggcggtttcttagacttcctagggatatggcaataccgagcaatgtctttggaagttgcaagatgaagacgcgcaacaagtgactggattgatatatggatcacgtgtccacctaagagctcgcaatcacgtgtaggtctatcgggaatatattattccgaagagtatatgtgtctctaccatgacgctttattttcccgaagacggatgtgcaattaaactaatgctggatatacctgaatagcagtatactgtctcacaaatccctcaagttcaaggaaccccccgaccagcccgtgtcgccttagccaactcactttgagctgtattatccgcatatctcttgtagatgggaaggtaatgcgcaagatcactggtagtctccttgatactccgtctgctctcaacagcagccagccaagtcctccatcggctccaaactccctcatccgcacccccttccccctccctcggaatccctaatccaccactcttaaactcatcaagcacccacagtcgtaccgcccacggagccaaaaccagatctggcagactaatatcttcaccaaggaagaacggtccctcactgtgcatctccttggtccaggctttcaggtgattcaaaaactcttgccgagcctgatccaaccccacatctgcgttctgcccagtgccatctgcaggctggtactgtaggaaacggtggaaagacgggattattcgagatgtcacatagtcaatccagatgcgtgcgcgggcacgctcgtaggcatcatctggcaagaagcggggttggtggtctgggtaagcttcttccaaatactccaagatcactgtggattcgtacagtggccgtgggtgtggatctgctggtgttgagagtgtaggaactaggcctcgcggatttagtgtgagtaatgagtctggcttgttgtatgggttgacctcgatatattcgtatggaatctttttctcctcgagggcaagccagactcgttgcactttattttgttaatattgttacttatggacgagtggctagagacataccaaatctgtatacctggtaagcagttggttggttaaagtatagaggggtcgtagacatacggacagaaccaccccgcatataactttaatggctgttcagcgcgatgcttatcgaccagcgccttggccgggccactggcctcgggatataggttggagtcaggatgagctgacattgtagagtgcaagtgggtgttttcaaggcaaggtggaaggtgaaaaagaatctaagttggacaatagtgtgacatcatatcttaagcatattcgtgattggacattatctctagcgggatattgaaattcaaaaggatagccttgcttaaatcatcagactctagtcttttccatacttcccgatcaacttctgcataatcaatatagcaccagatcgatagcctccaccaaaaatagcatgatgattcagatgatgataccttttggctatatcagtatacttctccaacagcaggatacgaaatactcacaattcatacaattccacccgatcagcatactccgccacaggctcagtcttcggtacaatctgatgatactgatcaaagaaccgagctccaaacccaccaaacatctgcataattccaagctcaaactcgctatgcccatagcaagctgacgggtcgtataccacatccccaggcggctcatcgtgacccgagccaataatccgaccccaatcagcattcccactccacaaatccccatgaacaacaacaggcacaatccccttcccctcaccggcggaagtataccccaaatgaccatccccaagcagccgaggcacaaccacatgcgcggtcttctcaaccgcctcgcgcagcccagcatcgggcccattgcgctcttcagatgtagctaggatcgtaagcagccgttcattcgcgtagaactcaggccagctgtcacaaaaccggttcggctgcttggtatcaccgcagaaggttggtacggggaatccgaatctgtgccggccggtgtccgggtccacaggtgcgggcgtggtatgcagtctgccgaggcggtgcgcgagcgtgacttcgtcatccgtgctgcggcccatcttgccgccgagctggaggaactctgttgcgaggaagtgcgttttggcctttgcacctggctcgtcgagtggaccccgagctagggcttgcggacagaaccctggcactgaggctgctattgcattgagagactcggattcgccttggaacatttcctctgcggctttgccttttgaggaggtttttacaaagtagcgtcgctcttctgtgccatttttggcgggaatctgggcgtggatggtgcctgtgcttgtgaagcctgaacctaatccggatgtggagaggctgacttttgattcggatgggagtgagagggcttgaagaatgggttctggtacgggggacattgctattagatttctggtgttaggaagaatagattttttttttaactagatgcaggatgcagagatgcagagacgcagagacgtagagacgtgaatagaccggattgcaaagggctatgacgtttttactccacatcgagcttttgtcaccatatgaaatgcttacagttcccatgtacatattcaccaagttgtataaatcctatatttagctatgagacgagatgagctcgtcacggtaagcaaaaaaaaaaattatgtccagattttcctacagtagtcctgatccatccagcaacgggtaactctaaccataacaaagatatcagctatgcaggagacagtttgttcagcaaatgcagcgcagtctttgtacgttccctcgtgtctagctccgtgtcatcctcgaggctagccagccgttccgcaaagccaagagaccgaagtctcactgcccgctcccgacaaccttcatgatcgctctgatcctcttcgtagatgaggttgatcactacccagacacagttcgatcgaatgtctttgttataatggttgaaataattgcctagagaccgcagcaagtcacggtggaacgcaacgatgcgccggtggcgtgggtgcccggccgccaagtggatgatgagagcggcggctgcgttgatgatctcattgggaatgtggagggactgactgctggagtctcggcggtgaggcagttggatggtacgcggtcgcagtgtatctgcgatggcatcaagcaaatcattttgaccgagttctttgaatagatattcaatcatctcaggtgcatctcgaccacagatcatgttgcgcagtaagtcgaatgcctgctcctggacggcaatatcgtcctgtcgagactgtgtggtttgagccagagttccgtgcagaacgagtttgcgcctacgtcttgcatcaggaaggaacatgtccaaactcattttggaaggaggcatggtatccgtcatcttgagatcctcgtcccactccactgcatcatccatggggttcagaatatcgacctgttcgccagccgagttggatcgacccatggcaaacccaggactttgatctgtttcctcttctatctcccgtcgagccactgcgcggacgggatcctgagagatgatctccataatccattccgggcccaaagtctcgatgatcttcattctgatgtcgtttgcggtgtcataaaccatgtgcttgagagcccagagcgattcgatctgtaatttggtgttggatgaatgagcgtgttcgcaaaggatgggaattatgttgtgggaaataatcgcctgagaagattatgttagctgcaaagtttgtgaacaaaatatagacatcgaccaacctctttcatgggactgaagtccaaggccaagttacagattgcagctgttgctgcaatttgtacctcgaggtcagaatggcgaagaagggcaaacagtggcttagccacgccggcatcaataagactagtcctaagcacgctcacggatctggtcagcatccgagctgtaccacaagcagcaagaatggtcggaatcgggtttccgtcctctgcagtatttctgggcattggagcatcagctggtgcatcactaggccttggcttgagggcgtcaatgatgtaagggactacgccatgttcgcaaatcgccttgcggtactcatccttaaatgggactagtgctgccaaagctttgagaatgttctctcggtaacgcattacatggcaaagggtcggagagtaaccggaaggtccgagccggcactcttgtggaagagactcaatgtcccgggttgggctactctctgcgtgccacatcggccgggatgtctccgtgattgggttgtaagtctccttgagaagttgggaaagtcgcttaagcgcattgccttctactgcgtgtctctgcaactcctggtcgtccatgaccaagttggctaataccgcaggcgcctcttcctttaagcgcaaggtcgacgagagcagcccatcatgaacagcgccttcttcatctggcagtcggacgttcttgtcaagcatacgaatcaagatgggaatcaacaaataactgaacattggaatgcgatgtttcttcgccaatcctaaccggaagagggccgtaacaagacgggcggacatcaaccgtgtcatgccattctctgatcggagaatgcagagcagccatggcacaatcgaattctcctcttcttctgggactggtgtctcagcaagtgaaaaaggcatggggtaggaatggctgtgtcggcgctgtgagcccccgtgtcccagaggtgggaaattggcagaactagatgattttgtgtgtgttagaggaaccgacggcaaaagctgttctatggggttggagccaagatgacggggtactgcggagcccgataaatatgtggatccccagggagctttcttgatatctgatggagcgaacccagcaacttgttttggaaacaccgtcacaattccaggcgatgacaggaagtgctctgccctccatttcgactgttcaatgatgacagcaactgcgcgcaggatcggtgctagctgggcggattcgggggccggaagtggcagatcctccaatgcaccaggatcttgaaggcgatcctccgcgccaggcagaacatatccttgggccacaacaaaggaggcaatcttgagtgccaaagcatccaacaccccggattctgctagtgccgtcttatgggtttcctctgtgcatagcttgccgattagagccgctgctaactcgatcgtggcctgagtacgcaggttcttgtactcctgcgagattatacgtctaagagaggtaatatttgcagaagcaaaaacaagatccgcaagctgtgtgtcccgaggccattgttcctggctttgcaacggtatccggtctgcaattgtgttcagaagccgtaaaattggaagacagaatgaatctgggcaatccgacgaggaaaatattgaaagcaaggtctggaggatattgctcgcgaatagtggggtgagaaacgtcggaccacctactcagtaaagtcagtgtctgtcttggcaataaggatctctagtcatcacgtaccttgtgccaaactcccaacaattaaagttgcttgaaggcatgcttcgtaatcttcgggggcttttggtgtggaccggccttggtgcaatatcgattcattaaactcggccgttcccggccatctcgaggtcagtacctgtgccaaagctggtatgattccctcgaaaatgtaggcttccttgcgctggtcatggccaatcaattcgttcttcagagtgcgcaaaactgtaatctgagaggaggccgattcggcactctgtagctgcagcagaatcggcggtgcggcagctcgcgtcatcttctagcgatcaccccctcccaacgggaggttctcggcgtttcactttgttggatcaaggaattagtagagaaattaaaatgaaattgaggaaatgatctccgttgatgtgaagcttgtgtagacctggatgtacaacatagatatgatggcagaccggaactgtagagccgggcctagagatactccgcactttggttctgcctacacacaccgttccagaaaagtggtcccggactaatgaaggagcgacaaccttactggtctgaggctataaatgtttgtataacgacactttgctacggaaactgaacattctgactgcttctatattaagatattctgtcaagaaatgtcattgccgagtatgatggggatagctagaatctaaccacacattggcatgatttccatgattgtttgcctttccatggaatctaagggtatgtattaggagtgtatgaatcttaatccatatttgcctgggtattgagatctataactagttagttatgtgtttggtagcctatattgtaaggccttgaccgttggtatcagtccccatctacatacagcactgcagccaatccgatatactgctggtttgaatctggggaatcagatattggcacgatgtaaatacaaccattagctgccatatacctatataggatctatatctatatatcttgatatctatgtagaactgcaagatatcacaatgtattctactaattgtcttggcactctaacccaatccagctagagtacggcagtttcaccccgcttcccggggctcggtagtagattcagttgattcccgtctgctccgtctgatccgtcacatccctgtacaatagatagaccgctacacaacatctagggctattaatttgatcaaaaagactgcgatccttcgctcgccaagatcagctctctacgcacctctatatacatacatggacatctagacagaatacaagaaaatagaaaaatacacatactgtaacggtacagtcaccggaagcatccagccactgacagcatggatctcattacctcacgaactttgaaaagaacaagattttcaaccggcttttgcccccttcctgttctcttgtccaaggccattcggagtgttcttcccagatcattccccctctttcctttggcgacatttggtttcataccatcgcaatcccttccgctttccctagccttttaagcctctgaggatgagggccggccgtgcacccacgccatccacagcgcgccctgacagtgcgcccacgtggtctcacctcgcactgtgaatgctcggattcccttcattccttaataacctagtcacaccctaaaaaactatgttggcgtcttcgccctcgccttcgacggctgcgttacgctccccgcttccttcaacttcggggtcgcattctcattcccactatgagccgactggcgctccacaattcaatagtcctagatcctcgcgtctggccatcgacgaacttcgctcagccttgaatcggcatactgtcgatccttcatctcctgaagtttcaggagatcttcaacgcaggcgcgcatcgacatccgacactctgaagaccctggtcaatcattcggccttggcttcgacaccccaatctacttcttccgccgtgactgcaaccaccccggcgactgccccatctacaaacccacccccagattcttcctcccccgctccctcgatgcccgccccaaccccgggctccaacaagcgcaatagccaacgcgaccatcactcatcggatgcgacgccggcggaatacgatggcgaagacttggaaagatcgcagtccaagcgcctgcgaccttccaaaccagaggtcaagatgttgcccacgcaatatgaactggccgaccctcgtgacatggtcgtgctgatctctagcatgctgatggagctgatccgtttcaacgacaagatcccactacaccagggtcgtctgactcgctttcactcccgctctccgccccgaatctccgtgcaagattacctccagcgattgacaacccacgctactctctcacctcccatcctcctcagcatggtctactacatcgatcgactctgcgcgctgtaccccgccttcaccgtgtcgagtctcaccatccatcggttcctgatcaccagcgccaccgtcgccagcaagggactcagcgacagtttttggaccaacaaaacgtatgctcgagttggtggaatcggtatgacggaattagccatgcttgaactagatttcttgttccgagtcgaatggcgcattgttccacaaccggaagtgctggtggactattaccagagtctcgtcgatcgatgcgaagggtttgaaattgaaggcgtttgccagaatggcagtgctaaagctggggtaacgggaattgccccagcagccggtcctgtttcaacataaagctggattgcgcccaaatacgccgatgcaaaatctgcacaaattacgttctgccctggaccactcgggctggtctcgagtcagccatggatgagtgggttcttccgcctgtcacccgccgagccactggcggtgtgaattaatacataccacttgcattagggggggtgatggtgtctgatctcgatgcaccattgcttttgatttaatatcgaggagcacaggcatcagacacggcgctttagaacagggatctatctcagcatataccaaaaggtcaatgggttgtaccttgttcctacttttcagcgattttttattttacggggcattcggcgtttgatgtctcacgggatgatgaggtgatatctatggccttttgtcttaaacgggtatttttttagaaccatacaaatctcaaatatcgactcataatctgagcattttaaattgtagggttggaaacgagatacatatggagcaactatcattatggagattcccatatacttctatgtctagcttctcgtaaatgtatttgatcgatgttcatttggagagtaaaccatataaaagaccaaagcgaactagcgtgagatcatgtttgcactgtttgcttactaactttgtatagctttcttcttttttccaagtcctcatgtgaatacttcctctttggctgaattattcaagtcgatgtcggcgattgaggcttaatgcaagcccaaggcactttcagttacaatcgcttttaccctatgacattggttgtacattgtcaacctatcctgcaacattctatctcaccccgcgcctggctgggtgccgtttgagatagctagaatggacgttgaaaggacaatcagaggcctcaagccccttgacgggcaagtggtccctattcgaacagtccaagagacaaggccccaagaagaattcggtatgacctacaatatcgccctcttcttgcgacatcatgattaaccaacaagtaggcgatgcctttgtcgcagaagtcaatgtgaagtctgcatccaaagtgatcaagtaagctatggactcccaagtttcccggtttaaactccatattaatcctcaattagggctatcgacgcggctttccccaaagacccttcccttccgctatcccacctccgtcgtttcgcgaaaaaagaattactcccgccgccgctgaaggcagccattgaaagccagagagttcctctaacggccccgacacaaactatcttcgtcctcatatcaccaccactgcctgatctcaccacactcaaggctctgctcgctccatttgcgccgcacacggcgccggccgctacaaacgatcctccgactacgaatgaaacgccagacgaagcttcacaatccgatataccaacccctactattcaactttaccctatcaaaattcctctttgcccccccttcaacacaactcaagccgaaacatggaccaagaccctctggccagtcatattcaacccagccgcaccgcgctcaactgtcgcgccgcctcttcaaaccctaaaacgtgtacaagaatctattgaaccacgggcagggtaccacctatccctagcgcgcaaagtagcagaggaagcagaacaatccgggctaggccgcggcgtaggcgcggtgatagtcgaccctgccatcgacgaagaactaaccgcggcaggctatgaggccggacatgacaccacgtcacaatgggacgaagcagtcctcgcggttgccggtgatgcacggtactcccgctccgaagcgcttgcaccatcacaggcccagctgcacgccggggtagcgccaaacccagcgagcaagatatatgacgcggatgtcgagggcgggcctgaactgcacgcgctgatgcgtgctgtcgatctgattgctcgctggcggcgagaacacgatcggtttgacgacgtgtcttcatcaacgactactacacatccatcgaagccagaaatagaagcgccagaactgagcgccttcgaatcatactttttataccgtcaccgtcctacatccaccgacatctcaaactcacctcggtctccgtcctccacattaaagagaaagcacgaagtccctaaccctgaatctgacttgagtatccacccctctacagacccttcccaatcccacgtctatcaaccacctctccctgctcctcccccatctaccgtggtatttgcggattctgctgctccgactacaacgccagcagccccgcgcatccgcactcgctcgcagggtggctatctctgcacagacttggacgtctacctttctcatgagccgtgtctgtgctgctctatgggcttgcttctgtcccggttcagatctgtcatcttccccagacgtgggaggttagcgagtggtggcctgtcttctgagccggttggtcctgtggccgatgagcttgatcaagccgcagaggctgatacctctacggttgataaggagggcgaaagaggttactacgggctgcattggaggaaggagttgaactggagggctcttgggtttgagtttgtggaggatggggatgtggaaatcatgggcgaggctgcaatgcctgtcttccatgcttgattgcaaatcatccggtataacctacatgttacataaataaaccaaacaacgtgttacaattttgaatacacttgagataaacttcctttgaaattttttttttcagtaaaaacaggctttttgacataccacacctggtattctgcgttctcgcgcaattcaggctgccgacctgtaacctccactctcttccaaacctccaacccattgtggtctgcaccattaacctccctcctcttccctactaacacgagcaagaaacgccccgacacccgaggctgaacatcaccaaccctcttcaacacccttctatgcagacaaagtaatcaagatcaagacaaggaaattcgggacttcgtcacaggatctcctgtatccacgccagatgtcaaatgacatggcaaagtacataaagaatttgataggaacagctcatggaaacccattcatctcggcctggtcatgtgcgagaaggccaagatggatttgaataaggtatccataagaaaacggagaggggtataaaccgaggtcaatatccctaagatacagcccaaaggtagactggaaaaaaattggctcaaagacaatgagttatggagtagcaaatgattcggattcgccacactgaaagaaaaggtcaaaaagaaaaggtaaaaacggagcccgggtaaatgcttttgtgaagcaaaagtgagatatgatgaagaagcctttgggtagagatgtggatgtcaaaggaccgccgtgccctatattgtgttcctctctccagatggctctattgtgaacggtgtttcatgtgcagagacgagctgtaaacacaaaaatggaacgagctcgccgatagatggatgttatgtatgacctgtcaatacaggcggcagataatcctctggagtgaggatcaatatgcatgactttgtggaagacacaaaactcgatgtgtcataggatgtagtgggtatgatgctttttcaacgcgtcgttcaagaagtgatgcccagcctaatggcgaagcttttggcgacaaacctcaatccatccgctggtagaacaatagataggccactttgtcgtcccgagggccatagcggcccaggggagttcggaccccagagggagcggcaggaggtggagtgactccgttcacggattttttgcttgcatgtccgttggcaccattgccattgacctggctccagcccttgtcgctatcagttaaatccatgtcatcctgatcaatgtggtcgaaaatattgccgttagggatcttgccatgcctgtgctgctcaagggcggcagcaagaaccttagggtcttcctcgccaccagcttccgccacttcctcgctgcgaacgcgacggatggcagtgtcgtccatgcggatccattccaagccttcctggcgccgaacatcgactgtgtagtgaccaccgctggcgttcttcccgtgatggtaaatcacacccataaggcgatactttgggggacctccctgggatgccatggcgttgcgccggtgagctgggaaaacctctcgcggaagctccaggtctaggggatacccaaccttcttccaaatcttctgggtggcacctgtgacactgtcgtactggaagcgcttgagatgaagaatgaggacaggaggcaaagtctcaatgaaaatttgtttggtcgcggttatgttgggtccgcgcgacgaattgaaatcaccctggatgctttccggctttgtcattcccttgagagcgtcgagaatgttgtgaacgtcatgagacccaatatcgagttgcaaaggttgatagggttctaatgtgacagaagtcttgttaccaggcaccttgaattctgaccgaagctttcctccgaagattctggtaaccggcgactcagcggcaagtgagccagacagttgggtgaccgctgctttttgcttgtggccaacttctaaccagccgtcgataggagaatcaccgccttctttcgctgcagtgtgcgtttcggcacgagcgcactcctcgtgcatctcctcgagaaggaagcctaggaactcttgggcatcctgctgatgtccgcgccgcatgtccctgaatcgtggcagctgtcgaaccatctcataaacaaattcaggaacgaaagagtcgccatattgctcaagctcattgggcttcaatctgagacgaagttggtcttcggaagtggccgcgtcaataacacggaattctttcatgaacataatcatcgcatcgatcaaaggaagatcgctgtggaaagtgtgcgcagcacgtcggccaagatgatcaaggaactgatagaacggggtacagaaaacaagaatttgcaacacagaattcatgtagcacatgtttccagtgtttaccagtcctcgaggttcaaggaacgcaatcttgtcgctgtattgagtgacatcttctcccaatttgctcaggacgtctgcgagtgatttgtttttctggataggcaatccgtgtggctcagccaaagcggccgcagccgcggcgcttgctgctttcgccgactccttcgaacggaccaaatcagcccaagacttgggtgcagctagcacaggcgagcttgtcttgttttctgtagaagaagctttatctgattctactactggggcaggagtaacaggtgcagtcgatttaggggttccagatgcgacgctgccatctttggcttggcgacggggggtagatggtacattgggcaccactggaataaccggagcaggctttggaattttcgactgtgcttgcgaccttgcaactgacgaaggggtagtgggctgtgtggagtctgcatccgactgttggaatgtcgtggttgttggggtttgaggttccgaaaattctcgcgtggaagaacaagatggctgagtctcttcgttttcatcgccttcgatgactatgtgcgtatctttggtgggaagctcaactgatgattgcataacacggcccttgcgacgtctccgcggggttctagccgggaagggctgctccggaacagagagccaaggaatctagactacctgttagaaaagtattataattcgagatgagagtaaacgcttactggtggggcaaaagtgggcttcggcggcaggtttgactgtggctcccatcgtggtggcggagaagcgataggatacccctgggccgagtggggtagaacagcaggatattcctgcaattcgggctgaatgggctgaatcgatggatgcaggacagacggagacattatcggttgcagtggagtcggagttctttgatgcatgggcatcgaatgaggaatatgcgtgggcgccatgacaggctgcgagtgaggatatgaggatacaatcatcggtccatagggcgcctggtatggacgtggaggcccctggatatgtccatatggtggataccagtaagggtattgctgcgatgggtatggttgatgaggcatatggccattcatgtgaggagggtatcccatgtactgtggtgatctcatatggggaggcgcggtattgtaagaaaagtcttgctggcgccttgaaggaggcataggcagctgcccatgcggcatggcagggaggtggtggttcatcttgagctagctagagaaaaaagttgtcttgacgttcggtcacgcgttgcctcagatgagtgccatgcgcgatagcagtcaagaggaagaaaaaatctggagatgctgtcgcatttaggcagccatcgtggcctcggtaagaggtgttggatatgttggatagttggagtgaaggatgaactgcgtcgaaagagctgttggtgttgctgggattggtggaaggagactggcaaaccagatcggagtcaggaaacaagagaaagagatcgctgtacaagtaactccctaggcggagagagtcaacaagtgggtatgagaagcgagtgagcagaaggagagaaaaaaggaaataagagacaagggttaggaggcctcgattcaccgtcaaacgaaatgaagctgaaggagaccgagaccgaattgggtgtcgggactacggcagcctctaacccccagtgcgccatatcagattctgccagcagtatgcttcgtaatataagtattttatacgtttcaatatatcaatatcacaaaggcctctatataaggtaggaattgaagtctaattcttaatgtttgaattttcctctactctctacattttatccgtatatctaggtgctaggcttatcatgaatgtctaaagtagaaattgtgtgaaaatcaagaactaactaccccatacggagttcgtaatcagtaagtaatgagatctggcggtgaattaggcggtcaaaatttaatataggaaaatcgccgggacttgttggttcacgtgacattacgatttgtaaccggagaggggcgaaaccgtaccttcacgacatcaactggcaccctgagggccgtccctcgatcctcactactattcttacatggcctctagggtccttcattctacttcacctcttctggtccaatctgaggcatctggttgatcactcgatctactacccgctagctgattgacatcttatcagttattggctttatccagagtctcccatataacccctcatcttctattcagccaactggctcgcttcgtctttctgccttgtttagtctattgcgctctcactgttgcaggataaataccgcataccgcagagatatgtcatccaatgcaggacagaacctgccctcttccaaagcggtaaacattccgaatacagcctcgtctactccatttcactcaacagctccagcggacaacagctctcaaaagcgcgtaggaggccctggaagttctcgaccagggatgtcatcgaaagcttcagctaccccaaggaataatcaagctcggaagagtcaacataaccgtcaaagaaaacctcggctattggatgatgacgagtataacgaatcggtgggttcacaggtctatctcctcaagagctgcctgctgaccccggagcccctatctaggccgccatgaaatccaccaccagccggaagggacagacgtccatcactcacttgatgaacttttcacttccacctcgcccacaataccaagcacctcctcgcaacatccgacggtatacatcatggggagcgggcgcaatagacaaatcgcgttatgttcatgcgaattatcgctttattgtgatgccaaatcaaaatttccatgctcaggcagccaatgccgatgtccatctcgattggacctcggtcctccaagtgctggtatctgctcaaacacaggctgccagttgtccgatctgtctttctactccagttgcaccgcgtatggcacggtgtggtcacatattctgcctcccatgccttatccgttacatgcactcatccgacgacgataatacggtccctgaaaaacggcaccgttggaagaaatgtcctatatgttgggactctgtgtatatctccgagactcgacctgtcaggtggttccgtggccaagaaggcgatcttcccgtcgaaggcggtgatgttgtattgagactcgtaaagcgtgagtcgggcagcacccttgctctgcctcgtgatgggtccgagacacttggtccaggtgatgacgttccatggtatcacgtggcggaagttgccgactatgctcgaatcatgaaaggcggcgaagactatatgaccgctcaatatgatactgagatcgaagatctccgcagacaggaagtcgaagacgagcttctctttggtgatgagaatacttggacacgaaaagcaattggttctatcatggatgccaaagagaaactgaaaggcattggcaatccgcctgaggttcggccagccaaggaacgcaatgttgcacctacgccagctagtcgctcttctgcacactctgttgtggcgccagcaacatcagatgaatcggaccatctttctcgaaccctagacgacgtccatcttgatcctgaatccagtgccaaagctaaagagaaaggccgcagcaagcaaacgtcagtgtcttccgggccagatcaaccatatcatttttatcaggcattgcctcagttctatctgtcgtccttggatattcgtatcctcaaggctgcattcggagaatattctatgttccctgcaaccatcctaccgcgagtggagcacatatcaacaggccacattgtggatgatgagcttcgcaagcgagtgaagtacctcgggcatcttccacaggggtgtgaagtcagcttcctggagtgcgattggagagacgtggttgttcccgaggttttggggcgtttccgcgcagagactgatagacgtcgaaagcgtaaccgggaaaaagaagcccgggaagaaaaggatcgtattcgcgcggagaaagaggaggacgacaaacggtgggctgccgctcggcgcaagcggccaagcattggaagtgccagcctcagtgaagccccattctctgctcatgacttccaaccacttcctcgcaacgtggatcctacattatttgatgctacggcctcctcggcctctcctccgcgctcatcgtctggattcggggcattggcttctccttccaccagtcccccaggcatccgcactgtttggggcacaacggcagtgggttcactgtcgccaagccttgaagctcaacgagctgtacacagtgacgggtggcggcagggctgggaggacgagctcttcgcccagcaggaatctgatctgctcgcccagacggcatctggagaccaaagtcaaaatcccggaccatcgtccagtgggggtaagaaaaagaagaaaaacaaaactaagatcactttgatggccactagtagccagagaggggcataaatcttgatgaagccttgcgtgtttcacttttctcaattgctattgagctcgtactgcattatcatagttatgtatatgatccatttccccgaatcttcgggttgtcttaatatgtggttctcggctgtgtccgtatgctatgctactgaaataccatctccaggatactccttgagtacttctaaagccttggtataatccatgctactgaaataaacacaattatatttacatttcatatacaaggaacattatgtatatctgtgatgtcttctccgaagcagagggaaaataactgttggaaggttgaagtcagaagaaataaatgaattattcaggcaatattaaataactagtcaactccgtacgacatagctcaaatacaataaggggtaaattgcatagatctagggcttcaaaataggcagttgacaacgagctccccccactcaaccaccaattctccctaaatggtaaattgccttttgtggggggaaatactgcagtaccctacatagcactagcgactggagaaaagggtattctgccccttttagtatctatggagggaaatctacaacctgactgctatctgattttgaacggatatactccgtagatgtaccatatatactactaataccgttcacgctctactactacgcctatcacaggacataaaatacccccttatagacttatataccagatcaatacttgggtatcttgcagattttaaaattgtttcttatgtaatcattcagaaccggggcccgcaaagtaaacagtcagggcattccagttttttttcaccctcgctcctttttaccctcagccattcctctccttgccctcaattgcagtcaattgcagtcggaaccttggtcttccgattaagcgaccatgactttaacccgctcgcaaacggggaagacccctaagtgagtagttcccaccggaatctagttgcgacgtatccacaccctgaatcagggtatatcttgccaatacccggaacaactggcctgttcatagtaggctttttgtcaagctaatttggaaccctttcttcctccagaaaaatggatcgtcccggcttcgttgagacccccggcggccgtcgtgccacccgcaacagttctgtcttgggaagtagcgagaatgaggcctccctctccccttccccctctctctcgagatccaaatccgcctcccgccgtcgtgctgcagtcaaaatcaagaccgaggaggatgatacgccggtgaaggtcacgcccaatggcaagactaccgacaccaagcccgagtccccatctcgcgtgatagacggttgggaggaaggcctcgatcccaaggtcgattatagcggacactttgaattcggtggctccttgggtgtgctgtccatgatgatcggattccccatgctcatgtactacatgtggattggtgccacctactacaacggcaaattccctcgccccgcggagaacgagagttatggcgactttttcgcacacttggtcgatctcatctacaccggtgctttcccatcggtaaaggcatggactatctactgggttttcttcatcttcgagggtgcttgttacgtgctgcttcccggtgtaagtgtctccggtcgacccctgccacacatgggtggcaagcagctgccatattactgctctggtgtgtggtctttctacaccagcattgcattggcactcattgcgcacgtgactggggttttcaagctgtataccatcattgatgagttcggtcccttgctcaccgttgccatcctctctggatatattgtctcattcattgcctacttctcggctttggcgcgtggcgcagagcaccgtatgactggctacccgatctatgacttcttcatgggtgcggagcttaacccccgcatgttcaagatcctcgacttcaagatgttcttcgaggtccgtctcccgtggtacatccttctcggcctgtctatgggtgccgcggcccgccaatgggaaatgtatggttatgtgtctggcgaggttatgttccttgtcatggcccactacctttacgccaatgcctgctccaagggtgaggagtgcattgtttccacctggtaagagtatctcctgccccagaatcaagattatttcctaatatttcatagggatatgtactacgagaagtggggcttcatgctgatcttctggaacttggccggtgtgcctctgagctactgccactgcaccatttacctcgccaatcacgaccctgctgaataccgctggaaccgctacttccttgccttcctctttgtcgcgtatctgtttgtctactgggtgtgggataccaccaacagccagaagaaccgtttccgccagcaggagcgtggtactatagtcacccgcaacaccttccctcagcttccttggcagacagtggagaaccccaagactcttactgcggctgatggctccaagattcttatagatgggtggtgtaagttcaagacaaataacaaaaatctacaagctccaatactaacaaccgtatagatggaaaggcccgcaagatccactacacgtgcgatctttacttcgccctgaactggggcttgattaccggattctcaagcccattcccttggttctaccctgttttcttcgcttgcatgatcagccaccgtgctcttcgtgatatccagcggtgtcgtaccaagtacggcgagacttggcttgaatacgaacgtcaggtgccttacctgttcattcctgtgagtaacttgaccttgaggactctcccagcacctatgtctaaccttgtgtactctagtatctcttctaatcgcagcccgctgctttccctcggagtcattgagacctcggtagttgagaccccaggggattcttcttttacttctttaggtccgattagaccatcattctgccaaacaaccttggtgtaacatgtataaacaaaacgtcaaatagattattaatatgtaccgatcatgaagcaagatgttccggccatcctatgatggcctcttgagttattttgaacccaccctgtgacttttttatgactttttgtacgacaagtcatcggattccgaagttgatccagatttgaagacagtatattctattcaatttaatgtacggagtacaattggtgcattcaagcaaaaccaaagaccaaagacgtctacttcgttgagatgttggccagtatcagcacatgactgccccgcgtgttatcgataatgatttcaccgtcaatcgtctgtatttctacggtcgtttcaattggtttctcaattctattccaatatatttctatctttgaaagaaactaaggcaacatgctgatccaagaatcctatcatgacgtccccaccaaagcggatggacaggggacaatgcgtatgtacactatggtcgctctcgtacagcacatttcttcccgctataacgccattgctccttcatgatgtcaattctaacaatttccaaggcatctatgtcttccatccaacaatcccaggctaccccaaagcccgcttccctggagtcgtagtcttcagcgagatctatcaaggttcgtgtgctcttctattattgtgaccatgtcggaacacctcaactaaagacccgacccacagtaacgggccctgtggcacgctttgcacgccaaatcgcaggccagggctacatttgtgttgctccttcgagctatcatgaattcactggtccggaacctctgaagtatgacgcggaggacacggacaaggggaatgcatggaaggttggcaaggtaagcgaaataagacagcttccatggataaattcattacttgtgttttctattcttgttctttattgggctatacttgtgattaatctcaagcgctgagtcgctgactgtctatcagaaacttgccgcttacgacgaagacgctagtctttgtgtggattatctgctctcgctgcctacttgcactggaagagttggtgccacgggcatgtgtctgggtggccatttggcctatcgttgcgcgctagatagccgggtcaaggcgagcgtgtgttacttcgccacggatatccacagcaaaacccttgcccgaggcaagaatgatgatagtttggagagagctggggatatcaagggtgagatgctaatggtatgtatatatttccgttgtgtttcgtatgtgtcgatcgctaaaatctccagatcttcggcaaaaacgataaccacgtcccgcccgagggacgcgatctcattcgcaagaccctccatgataagggcgtcttgttcggtttctatgaagtcgcttgggcacaacgtgagttgaacacatcgctcaccctcgagcatcaatatgctgacaagaatacttatccagatgcctttatccgtgatgagctcagcaagggtcggtatgatccagctattaccaaggtctgctttgagatgctgcttgagctgttcgggcgcaccttgaagctggatctgggcgatcatgatgggcaaaaattggtgatcgaggatgtatgttagaggagcattcgagtacctgtcaaacttctcaaacgaaggtgctgattcgctgaaatcggacgctatcaattaatttccaacggggctagatcgaggtcttatagtaagtacatatgaatactccgtagaggtacagggtaacgatacggcactgcaggcgccaaacaggatgcatatatatcctgaacgttggatcatatgttgtatgtgtgtacgttcactaaattgtgggttgagtccacctggtcgacctggcgaccatattattgtcctccggcaagggtggtcaccacttatccctaaaaaaagaagagaacaaaaaaaaagaaaacaatatcagcactgggtctagggagatctgtacgtatccagaagagtagaggaacaaggactgtttctaccatatacctccgggcgagagtactattattagcgactggacccaaggaagcaccatttcccacgcttcaatttccaaagttcaattgttttgatccgattggaatcgcattcgagtcggattcgagtcgatttcgatcgaaattcgtcccgaaaaaacttggaagttcagacgaggttttttttcactctaagccactagcgccagccctgtgagtcccccgagtaacctgtggaaatcagcttgaatcatctcttatttcccatcagctcgctattcacgctgcacggctacacagctatacagctacacacggtttcatttctctacttcttcaccttcaaaacaacctggttccactagagatccaccgatctggactggtcctccacgcgggtcaagacgccaccccagtctgaacactctttgtcaacattgcctcacgcctattctgcctctcatttgaaatccccaattcaaaatggggtccactcaattcgggaaatttcacgtaagtgcggatcgattctggagaccgacctcctaatgggcagatgctgaccgcacaccctgtatgggtaccacaggacttctgtcgcgactcgaccctaccagtttgcaatgtgagtgagatcgttctcaaaattccctataatggctggaatgtcaactgactgtatcattcgtcgtgtacagcttttcaccaatcaaaccgcaactgatgccttcggcgcgtgcgatctgaccggcattcctctcagtggggatagacaccttcggaacttaggtacgatctgcaagaccgaggtcgatgtgattggggacaaatgatatgagcacgattgctgatttttgataggttcgattctgctagccttcatcgctattgtcttgagcttgggtatgatatggagatcggacaagaagcacgctgctgtcggccggaggtatggaatatctttgttcgctattgagatgtcgactgacatggcggtatttgcagggaaatgcaattatttttgctcggtttcatcattattgagatctgcgaaatattcacagtgggcggcttcccgctgcacgacgcagtccgaaaggtaggatttctacatgatagactcgaggcctcggctgacagaaacatctagggattttctgcagtacacatcgccgcgattacggcgaattgctgggtccttctcatgaacgcactggttggcttccaattacttgacgacggcaccccagcttccatcggtctcatctgcgcatctgctgtggtcctcttcatcgggacaggctatattgcattggacactgcattcgattggactggccgcttccagtcaagccatgatacaccaaatcgcaacatcgccctctatgttctgtaccaactcttcccactcgtctgcattgtcttgttctacgtcctagaggccgtactagtgcttcgggttctgggcgagttccgcccaatgcgtaggtttaccacactggactcaaaataaacatgtgctaacggtgcaacagtgtatctcagcggtgctggcttgttgttcgcaattggtcaaatctttaattatgttatcagcacccacctgtgccaggcctcgcatggcaagatcaatggagctttattcgaaactctcttcaccctcctttctgtctccggggtctgggccttctggagtagtatcaccgaagacgactggcctctgcccgtgggtggcggtgcttataactgatttgataagtattccatttgcattatctattgactttgctttttcagtctcttgcgtgcgaatattaacgcctctaattattattttttgccatacatactttctttacgcttgtttacgagtctggatcttgaactgggattgtcgacgttgtgataccccatttccttgagtcatgtttcacgattcatctgccatctcttacctttacggtggttatcatgccttgttttgtgactcgttccagcccatctgtgttttatgaatttacctgcggcagtttcgatctgccagtctgactactggtcgaccacttccctgtcggcgtttacccgttattttgttttatgagagatacctcctcgccatgtacttagttgtaacccatgtcaaataatcgactttagcttctcctttcccgagttcattaacgctaactaaaacagccgattctcacccctcatttatatgaggacttttgtgcaaatgcccctccagtctcttatattggtctctgatgctacctacccccagtacggacattggggaaagacaaactttctaatgcgactcggtgttaccactagggtatgctagtttgcacatcgctttatacgccatctcccaattggccaccagtgtgacatccatgccgagggctgagtgtccatcccttgtgctgcgactcttagtacttcagtgtatataataagcaactatctaatccaacaacagcgtaactcccttcatagcccaatagataccgaatttggacctacccctctcgtttctttgttcttaattctctccagaagttgtcgaatatgcgcttcaatatcgccactctcgtcctcgcctcggggttcgcctcagctacaggcacagctcatgtggtcaataatacctacatccagacctgtacatataccttttcataaatcaattattcgaatgcaagttcgataagctagtatactaatacaaggtatacgcatagtgcaacaacagaatctagatatcgtccggcagctcccacagatgtgtagtctcgctgcttgtctcaacttgacagcccagattatgtgtattgctaatgccattatcaatggtgatccggctgctctgcagaagtgcttaacgacttccatgagtcaggtatatttctgccttcatcgagtgaacaaagactaagattcgagtctaggtctgctcatgtgttgcttgtgttccagcggttgagaatgtgcttgttgcgctcggtatctgtccagtttcgagtgatgtagacgacgatgagccttcttctgggtaatggccatgcagtcctcggccacgtgctagttaaaggtgttgtcattgcatgtcatacatagtttatgcttctttcctagtgtaataatgctagttaattgtctttctcctcttctcatctctatcggcgttcatgattaacttagtatcagggacatataggcaagggctccaaggttagataaatcgcataatgtcagatgtagtcacggctttcaaggttgggttaagttacgacagtagaggaatctatatctctagcaaaagtcatccagtgattgtcagattagtatagaattagttatgtgcagtgggtatttagaggtgttcaagaaaggaggatatcgagtcctgcacctgaactgaaaacacgagactcgtaattaatgtacgtgaaattcaaagtgcatttgaatgtatcaacagggaaagcttaaccaaaacctttacacacctcatagtcgaactttgacatcgacacatgggagagtccactcccgtctccccaagaggctgcgcacccactccaagccgactcctgtccactcggtgggccttgactccattccattaggagaaattcgttgctggacaccctccaacacagcaccggctaaaactttggcggtggagttcatagtatcgaaaacaaattccgttagaccctcgccagacactgttgcttcgtatgtggcgttgcccgaaatggcatagttgctaggctccgaggtatagcgtggtgcaaaccaattacttcgtaggtcaaagatgcaccggtctgaccaatgacatgacgagacgaagagaatcaggagcaatgcggagcagtagatacatggccggtggatgatgtatgtcaaggcaacaaacgagatgataaagagcggggaggcgttggtaggaataaaaagaagaggtaaccagctataatatgaatcatatgggttagtctgaatcccctactttgctgctgattgctagttgattgcttctcttaccttcgtagacagaacatgatggggtttgcgggcgctggtcttctgacggacggaaaggtgcagattgatggacaaaagttttatttgacgtgagttggatatcctgataatccagtgagctcaccaccttcgaactcagtaagtgaaagtgggttaaaagaagtaacagtaatccgattcactaatgacgcgagtcgggcaagaaataactagccacagtcgccacaactcggcaggctccagccacacccacggcttgaacaatattaccgagagttcttctctccttcatcctccctctctacttcaccacgttcttcaatttcatctctctttctcgtacttatctctgatttgctcttttgccgccttttctagcctttgtgatttccaatttcatactctgtccctctcgaaagagagcttctgagagctctgcaaagcttggatcctatcggcggaggtcgcctgtaaccacggcgtaacggcagaaatgtccacccccaccgatctccaggctctcttagccagtatccggcctcgtccttctccttcaaacactcctggccaggataaccaccaggcccagcgccaatcgtattaccagcctgctctgttcccgccgcaccctcaacagcagcaaccttacgatggtcagagctaccctcatccccagtcgcatggttaccaacatccatcagtatcctcaacttcccaaagtcctgccccaatgaatgctccccctcatcagagctctgatatcttgagccctaacatgccttctcctcggggcgaatggccccagcagccgcaaccgcagcataccaactcaggctctgtggaccttttgaatcttctgagattcagccagcgtcccggtgcttctgctcagccgcaggtcccagctgcagctcccgatcacttgcagcccccgccggcccagggagctccttcgtcgcacggacgaaatatttccgcgtctgacttagttgctactttgttcggtcaacaggcccctgccgcccctgcggctgcgcctgctggtcctcccccggccttccaatctggtcagcctgagggccctaacgagaatacacaggatatgttacttcgcctgctcaaccgttctcggccaggtcctgctgtcgccgaatcaccggcgctggcttcaactcagcaggtaccatatatgcaggctgccgttgatgaacatcagaaccagacagccaagaatgtcttcatggaagttgtggatgagagtccaagggcgcctgcgaacccagaaacggtcgtatcgcccaactcgaaggactcaatgttcacctatgtcaacccgtttgaccaattagccgctatctctcctgttaataagtctcctcagtccgcttctggtatccagagcccagctgttgaagtgacgcagaagcaaaagatcaatgtttctactaagctggagccttcgcaaacacccgagcttgcggccccccgggaggggacccagtcgccaatcttgaatgaagatcagagagaggctgtgcatgaggtagttggtcgtttcgtagatgagatcagccgctctctcagcggcgatgagcctcgggctgcaacggaagtcaagactgctgtgcctactgcccaggagaaatcctctgaagcatttctttcatcaatcgctagtcaattgcgcgagactactgctgaagctaaagaagcggcaagcttgacccaggttgacgagctcgtgaaggagacagaatctcccacggttccagttgccctgaaggtgaccgagagcactgaggctctagctgacagctgggagagtgcggaagacagcgccgaaaaggaagaggaacgagttgtctctgtttacaacttcccaatgaggccattcatctccattgctgtgaaagctacgtctggcaaacttacgaccttccgtgacgacgatgtcatggatattgctcgtctaaagaaggagttcgatcaacttgacaggtcgctgacagcggctacgtccgaatatattgtgtacgcactcgccaaaactggtggcatcagaattattcgacaggacgatggtagtgaccgacaggtgttccgttccactcgtgatcgagtcttcaacgttgcgctgtgtacagctcctaccgcggctggtgactccgaagtccaggcaattctcggcattggagtcagcggctctgtatattgggctttgatctcgcgttctggaaaggatttctttgatatggatgccttggaaagcgaaagcttgatcttcccacctttcccggcctcggacgagaacacctctggtggccagctgaaaacgcgagccaagcggagtactcgtcacaccaacttgtttgccattggtcggggcaagaacatctacgttgtttccccaaaggcagcaatgagccctgcctacggcgtttctggtacccagcggacagttaacaccgagaaattcttcaaggagcgtgcattgaagatttccactggtaaagccggcaaagacttcgccttcagcgatgatgattccgtcatcgcctcattggacaagaccggccgactgcgcttctgggatataaatgatatgcttaatgacgcaagttttgtggaaggccctgctcctgccgagatccgggtgcccttgactaccttcgtcactggctccccaaccgaaaagtcctggcccacttcggtcctcttcctcgataagcttcgcgcttattcgcggtctatggcgctccgttatgttttggttgggctcaagcaaaaccacaccttgcagctctgggatattgggctgggcaaggccgtgcaggagttgaagttcccgcacgagaacgagtccgatgctatttgcagcgtggcttatcacccgtcatcgggtgtcattgtcgttggccatcccactcgtaactctatctactttgctcatctttcggcccctcggtacaatttgccccagatgtcacaggcagcctacatccgagacctgaatgataaggataacaccctacctaagcccgagtccactgcttgcttgagtggaattcgggagatctctctcggttccaagggtcagctgagaagtttggagcttctccctattaccaagtccgctactgacaagcgcggcaccgaggaaacccccctatttgagctctacgttatgcactcgcgcggtgtgacgtgcttgaatatcaagaaggaggatttgggctggactgcggataacaaggttattcgccctattgatgcgttggagcaaggcgtgattgaaatcagtgatcttcaaactttccccacatacgccaccgatgatccatctcttaacggtgacaccgcctctatccagtctcgcgttggtccgaaggagtcggcgaaaaagccagagattggagaattggcttctggagttgctccttcgcgtaacgcttcgcctatcaagttggctaagaagaaggaggagatcagtgaggcacctgccgtggtcgagaagtctgaaaagaagaagaagaagaaggcatcagctgccgccgaggctgccaaggcaaaggagccatctctcactgctggtgtcgaacctctgccggtccccgccgccgctgccaaggaactacagactcttgcctcgtctactacggcgatgggtgccacccaggcggccgaacatgcagtgcccggtttcggtctgtcaagtgaagctttcagcaaacacattcagacactgcagggcagtgtttcaagcgagtttaacaagagtcttggccatgagtttgagaacctccatcgtcgcttcgatgatgaacgtcgcagctgggatgctgcctcgtcggccaagcaagaccaagtgttgcgcctggtctctagcacgctctctgacaatgtcgagaagaacttagcacgtattgtctcagccagtatccagaccgatgttattcctgtcatcgccgatgccacctctgcagcagtcaataagcaactgaatggcgctgtctctcaacagcttgggggtgcgttcaatgaggagttgcgacaggttcttcccaaggctgtcatcaatgctatgcagcaggcacctgtggtaaaggctgtctcggattcggtcgcacagaaacttgcacctcgcattgaggcggaagttacccgggtcatgcagtcttcgattgcccccatgattgagagtttggcacgtatcaccaagaaggtggagtcggatatggaacgtcacttccaggagcagattaactactacgaggcccaacgccagagtgataccgcaaagatcgaggagatgtcggccctcctgcgtggcttgtccaatactgtttctttgctggccgcgaatcagggccaccaactccagcagacccaaagcccgcagcacgagatcccccaccgcgagatattgaacgccaacaagcactcgactagacagccaagcgagaatcaggtgcgcatgccgcagcccttgtctcagcctgtgcttcagcctcaggctatcccggtccaggccccggtcccggttcctgtcgcttcccctgtcgcgcgatcccccgaggaaatcgaaatgggggatattgtgcagcttatcaatacggctcactatgagcagggcactatcaaggttggtttcaatcacttccatatattcggtgtttttactaacgttaaatttcttagtggctccaatcgaaccagcaagctgatctttttgacaacttctttgtccacatatctcccgcctacttgtctcgactttctgccatcgtcatgctctctgtggccgttgctgtcaccactaccatgcagaccaacattggccagcgcctccactggctcgaggtggttctccaaaatgtgaaccccagggtatgtcattatcctatctcaaatatttgtaatattctactaactctggctttttaggacacggatctccgcgaagttgcacctcgtattctggacatcatgagccagcgcctcaataccctttacatgtcagtcgttgagcgcaacccgcatgacccaattctgcgacttatttcacccctcgctcgccgtgctcgcgaactgcacgccagcctttcttaaattgcgttttatttctcgccttttgcaagtatatgaactcggggccacgatgagttcatgatctcgatacggacccatcaacggcgttattatcttgctttttagtatgacgtgtaatgatatcgaaggaatgacaaatacaaaaccagaaaaaatacatgaattcgatcggagaatatagtctctctggtaatcttcggggatgggtggaacggttatcttggtcatcaggtcaaacacaccttgacgaggttatgaagtttcctttgattaggacacattatttgataccaatgcacaccacttgtatttgctatttttccgagggcatattctatgctggtctaggcatagcactgtgaatgctggtaaagctttgttcaacctctcttgcttgtatttgtctagttcttgtactctcatgttattgagactctatcgcttaagattgaagagcatccggaatgacgaatggtgcaatgctcgccaatttctcgtatgtctccatcagctcgcgctgtggcccgttcaactgaaagatgacaccagctccagcttgaaccaagcacgatttcgatccggctagaaatttacgaggaatgatataatgacccacgcaacacttcgctctgctaatcaagcaattggatgaatccaatcaaagcgaagcatagccgtacggatcgatcaaatcccagatgcaattaaggctaggtcttgttatccccgcctgtggtctgctgaataactaagtgggcaggtctctctgactcaggctgaccgacgccgggctgctgaaacggtgaacgaggacgaggatggatcaccgaactaccaatgccaaagaatgacaagctggggtttgcaccccggaaaccacgcttgcggctgcgataactcgcatcctcccccgttgtgagaggtgtggccgtgctgtgggtgtggctgatgtttgagatggggaccggctcgggcccctcgtatgtactggtgctgatgacgctggaaatggtcgatgggaggtgatagccagcttttccaatggggacagagaggccatgtacaacctgggtttggtcagaaggtgactaagataggagggatgtaggttaggttatttagggaggagactcacaatactgcagattactaaaaaccagaccacaacttggatagtctccatcacttgctttacgtcccctggcacctcgccatcgacttgtatcttgcgcaagaattcacggctgattgacaggtagaagatagcgcccactccgatgggaccgaagaagccgacgaatgcagcctgggagacgagctcgatctgcgggatccatttgtgcatggccaagacgattgggaggcggcggactaggaggatcaatattcccaagaagatgagccgattgattggaatcacgctgttgttcaggaaggatgaccatgggcagaccgctccaaaccacatgaagacagacaggttaaggagcatgtcgattgttggttggagggaatcgtctatggtctcaaggcggaaccagtcactgtctctgttagcattcatgatatcatagcctgcatcgaggtgacctactcttgcgtgaatacatttccagcaatgaaacaggccagaagatcatctgttccaatcaaaccacaggttcccacgatgaacagctatttgagaggttagcaaagcaccttttggggggggggaattcgagatgaactcactgcaagagcaatggcaaacaccaaaaagctctcccggtcaacatagcgcttctcctctgcccagtgcaacagcttcctcgcaatccaaccaaccacagttccatagactatgctcaacagaatagtatatgcccaggtctcatagaaccacaacgccatcgccttccccgcaccaccgctatagctctggcttcccatcccagtatactggaggagataaatggcaaagaaaaggaacgggtagccaaggccatcattggcgccagattcagcgataatgattctctgcagctcgcggggaacatgtttatcggcaaatttgcccttaacaatggagttggatagaacggggtcggttggggtcacgcatgcgccgacgaccagggcatggaggaacttaaaattcggaaccatggcccagatcagtaggctactgcacatccacatggcagccatgcctggtccaaggagtagccctaggctccgccattcgatctgcagataccgctttgggagttggactccggctaggaccagctgcacacctagcactaagcgggtaaaatgcaaagtgattacctcgaggttttcttcagaatggagtgcatagtcatccggtctgatgaaattggctgcatggggagagaataacactccggctagcagggagattactatttcatgttagcaaatgtggtgataccaggatgacttaacacttacatgcttcggataggtagaactgctccttgcaaaggtaggatactagtccgaatagggaaacaaaacctccgagcgttgcgcagacgatgttgaagttgatcaaggcgagtgtcggcattcttgtctgcactatatcccgcttggaatgttctgggttttatttgggggcgatcgggctcagatgtatcaaccaatggagtattctggattcagaagagtcagatcaatgagatctagagacttgggtaatgtctgtaggtcaaggtcaagccaatgttattgaatcatagtttgaatttcctgtgtgattgtaggcaagatcatttggatatatggaagtgactttgaagcaaagaatggtagcatttgtatgttgctatgggggtgaggaagatataaagatacgaagatgagatgtctgtggttgggacatcccgggtcttggcacatgacctatatagtacactatagtacacagagaactacagagtcaactagttacttgtgtactaattgatattcctattccattggatgcaacattctcgctttgttttttgacaaaatgcctagtagtcttcatcaaacaattcatcgggcacctcttgggccacatgcagtgcctctgcctttgcagccacccccctttgggctccattgacggctaatttatcggcctcttcattgccggggtctttattatgacctttaacccattcaaacaaggtcttcaccttaaggtcattgcgttcctcgattttgatcagaatcgactcaaccaaatccttgttctcaactggcttcttgtcccgggtcatccaattgttgcgacgccagttgataaaccatacagtaacacagtcaatcgaatatcggctgtcggtgattatggttacatctcggtgccgaggggcaatatcaatcgcccgaaggatcgcggtcaattcagcgcgctggttcgtttgacgactgccctttagtggctccgatacgtttctgctgggataagtgacggaagttagaagacgtggtggagggtagtgaaaatagcccaatgtgcgagtgtacgaaccttgcatcgccaggcccaaagtatacccctaccccggccgatgctaatggggtgccattccttaatgaactcccatcggtgtatatccggagcatcccagggatacccgttgattgcgattttgttgcagtcatctggggggctgtcttgtacaccacctggccagtagctgggtctaggatgacgttggggtcgaacccatcctccgctcctgtcggcagtgggccgtcgcctggcgcaaactcgactccttctgcgtttttgggcttttcgggcattaccatatgagggccagagggcccagttgccacaccgaacccgactggggcctgtgtctgcccttcccgtacaaattcctctgcctcttcacgggtggagaacttgcgatatcgaggtcgcggaaacccgcgaatctgctcctgtgccgttgtccagtctgtgtatactccagtaacccggcccctttggataccatagaatcgtgtgttctctgagctctgcgattcggttgggagcttgacaccgttcagaaacgcgttggctgcttcttgcgagggaaacgattggactaaggagcttgtgtgtcagtctctagctaggtttgcgcgtctgtttggatacccagtgcgaagagcgcactcacagattgctcccttgaatcccgttatttgagctagacaatcattccacccatagtagataccgggtttgtgacccgccttgacggcataatatttggccggtgcgtttctcttgcgttttgcgcctgcgaccggcgagggagagggtttcgatcctggtgaagctttggggaccgggctcggcgagggtgtagtcttattcattgcggttgattgatcgtcgctagaggttgaggcgaggattgtgagggtggggaaagcagagaatggcctcttgtaggacccagttgttggaaattcactattcgatgttgtattcgtggctgggcggacaggaataaatcgaggaataaatcgcgggcagcttagaagggaacaccaaggtcccaacttcaaagctgaccaaacacggccgtgaattttgatttgtttgagatgtgtgtatttttgggttatgaatctgagaggtagagatgatcgcttagagggtcgaggaattgagaattaggaataaagaggggggaggaaggggagggggggagaatactcaatccagcctgttgccagcgcttgacgatcttgatctgacgccaattcctagttttgacgaggatattatttcttgtgtttggtttgattggatttgattggccttgttttcctatacgtttgtgctgattctagtgtttgtatatatatatcctagaccggtatatcttccatgtctcagatcaatctgttgatttcacactaaaaaataagacaaaagaatatatactaggtatatagagctaaagccctacgctcaatcgtctcaatatctcttgcacctctcgctgagtagactgcacgacgtgctcaacagagaccaccgcattgatacttccaatactcgcacccctattgaagccattaacacaaaagtccaagagatacatacagtacagagtccggatactcacgcccagatagtcctccgttggtgttcgccagcctctttagcctcattgtatcgtcggatgatttcctcgtcactgaccccctcctgggaatcctcgtaactaacaccaacaacagctctgccatcatactgtctcggaaagagatcagttgattggaatatgtcatgtcggatagacttgatggttgagactccgccatccgtcttcgatacgatggtctgtttaatcgtagacggcgcagggcattccgaggttgcaacgaactagactcggttagcaaggttccatctccacgagaagaaacaagacctacccttgtgcccataacaataccatcggcacctaacacagtcaattacctgcaaaaaagtccggaacaacctacctaggccgagagcagcaacacagcccctcccatccacaatgccaccagctgccaggatagcagtgctcgtattccgagtcctcgacagaagatctcgcacctcaggcaagagggatatcaaactggcaccctgggcccactgatgtcctcctgcatcggtcccttgaactactagagcatccaccccctgctgaagtgcttcttctgcagctttgatagttcctacctggacaaatatcctgatatcccagtcagcagtctcctgggcctttcgaatggcttgtatgattggaagatgatcggcgtcagtccgagggaacgatagccagactgctgctactcgatgcttctggagtatgggaatggcattgtcaacgagcccgttcggctggaaagtcaagaaaccgacaccaagcggcaatggttgaccatcggtcaaaccgaggatagagcgggtatttgccagctcagcatctaggcctagaagatgggtggattcagatcggaagtcaaagcccccaccaataaaccctatagatggttagtctaaggtctagcagttagttcggtttgctataccgaatcctccggcctttccgacggcagttgctaggccggcatctgtaaacccaaacattggtgcattagcaatgaatggagcggctgtatgaggaaaccattgtagtagtatgtttgcagccattgtggtatggaggtatgaagagaagtcttgcgatgcggggcatatatatggctacctcgggatgtaataggtacgtatatatattactaatcgtagtccagttctaaataactagtttataacagaagagaatattgagcattatgtatgataacaaatatcatctgccaaaatattataggaaagtttctcgttcatagtactttaagaagcctcgtcctacatcaatcagtttcctggtctagcggttatgattttccgttaacaattgcttcaagcaagtgttccggaaaggttctgggttcgattcccagggaaactattttttggtctttttcttctcctcagaaagagtttttcggttgcgtgtggattgggagtggagatgggttgaagtggcgccgatagagtgggccagcgtgggtatactttttggagagaaaatcaccttcgcatacggttaaatgttgaatgcatgtaagataagaagaatccacgtagtcaaattataagaagataaacacatttacatttggttggcccctacaatctcgcacggaatgcgcgccgtaagggttcgagagcagtaggaccatcgtagatctgctgctcgacaacgcgggtgttgatctaagagcagagttagtagaacaaacgacaaagtgatgagggggaacctacatgttggagccctaattgatcaatccgttccaccccaagcagccgcatacatgtcttgatctcatcgttcaggactaccacagagttagaaatagaaccagatcaaatacccagtcgacttactctccaatgttcgacgaacaccgtcggctccaccagccgctaagccccacagagccggacgtccaaggccaactgctttcgcgcctaggcagagagccttgacgacatctgtgccacgacgaatacctccatccacatagacctcgatcttgccgaagacctcggggcagtatttccgaatttccaagagagtatgaactgccggaggagcagtgtccatggcgcgccctccgtgattagagagaatgatacctttaacctgaggtgcgtggagtgaggcaaggtatgcatcctcgtgagtctgcagacctttcaagacaataggcagatccgtctgagtggcaagccatgccaaagtatccgtccatgtcaaggaaggatcggtgcctgcgaacagttgctgaccgacacctccagacccttgggttggattgggggtatcgtccgatgagcgctccgcggcctttaccccgctgggcacggcagcggtccgtccgaccatgccggctcgctcatcctcctcgcgtttccctggaactggggcgtcaagggtaagaactatgaacttgatcgccttgagcttctggatgcgtgcaagcatcgtctcactctttttgcggtcaatctggacataaatctgccagccaaagatttgatctggagcagcatctttgacgatctgctctggtgtcatggaagcgttattggaaatgatttgcatggccccaaagctgcgacatgcttctgcgatcccggcctcaccagatgggtgacccagacgggccatcgccgcgggagacacgtaaacaggcgtgttcagtttatggccgaggacggctgtgtccagatcgcactttgtgcaatccacaaagactctaggtcgcaagagaatggaccggtaaacctcattgttgaagtttttgctgatttggtcgtcggatgcggagtaatagtatgcccaggcctttttgctcacttggttggtagccacttcctcaatctcgtccaagttgaggagacactccataggtggtggaccctcaatttcttctgcaggttcagaggatgcctgctcctttggtaatgtactagcatcgatggtccccaagcaggcctcgggcttaagctcctcctctaagatacctggcgggtgaatgggatcgtactcctcggtggcatcctgcccggccaatttcaaaatgatctttgcaccgccggggtggctgcccaggaaatcggtgacctacataaagagtcagacgtggccggggaatgaataatacacaatgggaatcgaatgaaagcgtacatcgtagaccttgccgtacagaaccacccaacaactctcacaagtgttgtgctttgcgactatttcttcagtcagtcgaaacatcccgcgtgggggtcagggaccggtgcggagaagcaataccttctgtcgcatcgaatacttttgccattctcaatcacggtgcgaggttggattgaatggtagctcttagaggctgcgactgggtattctctggagagaggaatgggaagggaaaaaggtgagagaagtaaattggagatgcatctcgaaccccggagagtgtggggaaccttcggtcgctttttcctcgttggggaattttcaattgccggccaagaagggattggaatcgacacgacgttattggtggaatatatttggcctattatcaagaatcagaagagaaaagttcattgtatacggtatacatcatatacatacaacatagtacctgagtcactatacacttccaaggtcccacgtgagagccaagggttccagttcacccgcatctcttcccctcgaactcttccactgcggaacccaacttccttgaacttgtgacgtcggatatcattccacgaataattcacacttgaactctttcaacatttcgcgaccatgtttgaggtgtgtttaccgtgtttacctagaatctccctgtctacccaatattcttcatcccatcctgtcctacctcacccagtagtagtggtctgactgtctcagcgtcgtgcaggggatcgttatcgccttcgaatgcaccgagcccgttcggcagtgctgacttcagatgaaatggtcgaggtgcgtgcggcccaacgcacctttgagggggcctatgtccgaactgctctttcgcagttctccttcgccctggtcgtactcaagattttcaccgccgagttctacagtattggggctctattcgcgatatacggcacgggagttctcatcattggacttttccgccgttcgcagggaaacagacaattcttctctgaagtaggagaggatgggatccatcggcacaaattccgtaccagtggaaatgcggtcttggtcttgacagcactgagtattgcggcatacgcatgcttgattggcctgaccttgaacctgagcaactgataaggaacattctgccttgatggttgcacgcgattcatccatacaccgtatccaatatccctggaggctatcttctaggcatgttatccgtgacaccccctgcgttaccgccaagcgccaaggattccgcacctgaccacggaatatgggttaccattttcggcgcttacggtagcggagatcagcgtgcagcaatggacgcctacagttggtcggagatcaatctgttgtgacgaggaccgaaagtcgccaaggaagccgagtatggatcagcccgagcggtgagactcaggtcatacaaggcgttccaataattattgttcgattcactggaggctgagttcgattcccaacacggagggttatctagcatcaactcgcggcgtgccctggtatcccttacaagacgggaaacccaacaggtatgagcattttggtggattatgaggatattgtagggttggcaaagtgcacaggggcgagattgagcatggttcgatgctccaccggcgtgtttttctcggacctgtacccgtatgctttctagccaagcattctctattagatataggaccaatacatcttgcatgattttgtgagacctccaatcgatgtgaagtctataagagctgttcaatcctggatccgacctggataccttgcatctccacatctttcccctcatgctgtatacactttgacatcatatgggcgatcttcaagccatcgatccaccatccagtggactaagtcaattcggcagcgtaatttcatcattcctaatctctgacgtccttggcaatatccttgagtgatattgtacttccacatattggacaccaacctcaaaataattacctttgcgccaaaaagaacatatataaaaaaaaggaagccaaccactttgattcttgcaaccccttgaatatctcaggtggtcaacatcagacccagtgtttcccgttggttgactcatccaaacctcacaacactttcccttccctcccctctcccatcatctttttttcagttgcccagctgtgacacaagtccttatccaactcaagatcctgtgagaaagctctgaaaaagagcaacattaccccttcttaataaaacacaaacacagaactatcccccagtgggatggcgcaacattctagcattgcccggtcggccatgacgtcggccacttcgcctgagatgggggaccagaggattgatattaaatccaacggcacctccaatagctcgggatcgggaaaagaaggagctcttatgcccccgaaaactgtggtcaaccgagcgctaggtaacgacctgcattccgattcccacaaatcttcactgccgcccaagggcggagtcggaacggctttgacagacactccggtttctaccgctcctccgtctccacagatgtgagtattgtttctttttttatctagaacctttgaacttcactatgttcgagcctatcacaacgaggcttgaccggctcatctcgggatgagttcagttccggggctctttgctgccttattctgagctaatctaccttaccccggactccaccctgttgttttgcattttgctgccttacgacttacttggatgcgcttggcgaccctgtgactaatatgatccttgcagatcgggcctttatcagcctccgggtactcccggtcgagtgcgagcaactaccctcgatatccccggattgaccaagtccaaagtgtctccagatggccgtattgcccagcgcgatgtcggtgcgaagcttgtcattgtcatggtcggcctcccagcccgaggcaaaagttacattacgaagaagctggctcgctacctgaactggctccaacatgacactgaaatcttcaacgttggacagcgtcgccgtgtggccgcgggaaagtccccttcacctgtcccgcttgatcgtggccatggccggaaatcaagttctttccacaaggatctcgttgactcggtgcgccggttgagtgtcagcgttagcaccactttgaactcatcagacatctctccgccagagaacaatacaccgcttccgccaccagtggtgccaaccaagattcttgtgaatggagaagaaccggaacaagtctctctcaaccaaagtactgttgtaccctcgatcgacgcaggccctgcacaatctcatgagaacgaagaagctatcaatgaagcgtctcctgaaccaatggaccagaccgccagcttctttgacccccagaatcagcgtgccgtcaagatgagagagcaggtcgcgctggatactctcgatgagttgcttgagtatattctggaggaaggtggcagcattggtatcctcgatgcgaccaacagcaccatggaacgccgcaaggcgattgttgaccatattcgcgatcgtgctggtcctgagctaaatatcctgttccttgagagcagctgcgtggatcaggatttgcttgaggctaacatgcgcctgaaactttctggtcccgactacaaaggccaagacccaaccgaggcacttgcagatttcaagaagcgtgttgctctctatgaaaagtcctacgtgcctctcggcgaatacgaggagaagcatcgcatggcttacatccagatgatcgacgtcggtcgtaaaatcgtcgctcaccagacccatggcttccttgcctctcaagtcgtctactacttgctcaatttcaatctctctccccgtcaaatttggatcacacgacatggcgaaagtctggatgatgccgcaggccgcatcggtggtgactctgatctcagcgaaaacggaagaaggtacgccaaggcgttggctcgcttcgtggatcaccaacggaagcagtgggaagcatatcagcgacagaaacaccttctcaagcacttcccgcctcgagctggtgacatcacccctcccaacccatcctatattccccaggaagggccacgcaacttctgcgtctggtcctcaatgatgcaacgctccgttcaaactgccgaatacttcaacgaagatgagtacgacgttaagcagatgaggatgctggacgaaatccattccggcaagatggaaggcatgacatacaaggaaatccaagagcagtaccccgaggagtactcccaccgcaagagagataagctcttctaccgataccccggaccagggggagaaagctatctcgacataatcaaccgatcgcgcacagttattgttgagatagagcgcactacagaccatgtgctcctggttggacacaggtccgttgctcgcgtactcctggcctatttccgtggtctaaagcgtgatgaggttgctgacctcgatgtcccgatgggcgttctgtacatgcttgaacctaagccatatggggtcgagttcaaggcataccgctacaatcctgaatccgattggttcgattaccttcccaattacgaactgcatcaggtcaaagcacacgcctagaatttgaacatggaggttcgaaatttcatgacttgctacgacctatcatgacttcttttatgggatgaattggccggtgtttaaggcactggtcattttctattctccttcacttttccgctctttactggactgtatccttgatttttattttcctacttgcgccttgattatgtattatctatgctttctcccctccactgttttccggagcgttcttttattcttttacagatgacctaggcactcgttacatgacgggcgttttatctgtactttcagacctgcgatgctcgctagctttatgagctggaggtgacaggtcaccaagagcgtctctccctcgacgtttcattttcggtatctttgcaaatgcaccaagatagaatcagccatggttttgcttgatagtctcaatagctttacttgctacggcatgtcaatagaactatgcagacgatcataataacaatgaaatcatttaacataacggcatccatagaacattctgatcgatgactatatgaaattccccctaacaacattctttattccttctgctcggccttcaccttctcgaagatctccatgaaggcctctggttcatcagccccttcgacatgatatctcccttgcactgagatatacggcacaccagaaaccaacctgttggccgccgccttggcctccaaatcaacctcctgagcaccaacatcctcatctaacatcttcttgacactctcccgatccaatcccgctccaacacccgcctccacaaggaccttcaaatccgtgatattcttctcctcctcaaaataagcccgaaacagctgctccgcaaccctcgtctgcaacccaccaacagcaccaccatcaccaccttccacaccctccttcctagccgcatcttcagcctcccgctgcccagcaaaccaaagcaagcgatgcgagtcccgcgtgagaccagtattcccgccaaaactaaactggatcccctcatccttgcccacagcagataggcgcgcgaagatcgcactcacgcgctcagccccgaatttccgggtgtacatctcggctttgtttacgccgggatactcggctgatgctgggttgaggtagaatgctttccagtgtaggctgaatgtgtctgctgggtacgtggcttggtgagtggttatcgctcgtgagaggcggcggtagccgacgtagcaccactttattttttatggttagtatgtaggtctgacggggtttcgaggaatgcgtatagatctgtgtcatatggttggaatacttacgggacagacggtgtctgagattatctggatctggaagttcgtcattttgtcaaggtgtgagggagacaggacaggtgaagtggaatttgggatatctttgctttcttgtattttttttgagcttttctttggattttggggatgacattcgatttgtaagcgttccgtccggtttcaggtggtttctctcgaatcttctaaaagtgtacattctcatgtgctgggagaaatgaaataattgatatatatcacaagtgtctccgaagttattttgaagtacacgctatcatccaacaattacacgaaggctctacaggtacttccagttggggacctgataatccagaaggctagccggctatatattcaaacaaacaagccctagaaagactatcacagaatctgctgggcctggttcaagttattccacgaacctcctgagctgctgtcgaaaacagctgatgagttggaatgaacaggtacactaggaagcgggtgatgacgggcacgatctagtgccgaggaatactgtgaacgattagtgagaaagctgggctgaaagttgaacgaaaacgattgggaagtctaaccttgaagacaaagttgaggattaaggcaactgccaaaccgatgcagactacgataggaccgaacatgttgtctaggtcctttccactccgctggcggatgagacgggcccgtctctcgtatatgaaccacccccagactgcggcgaagatggcaaagaatgtgtagacgacagctaatgcctgggctacctggttgtgcttgccagcagcattgtagaggcccaatgataaactcgacaggaggatactgatgtgaagccatttgataaatgttcgctggttggcaaggtagaccttactttccacacgaacgggcccagcgtctttgatccagacgccggggtgtcgaacaccaggcggcaaagagacagatttcgccccaagccagcgctgaggagaaagtccgaaaaaccgaaatatggactcgaggcgagtgggccgctcgggttcttcctctggttcgggagtgggtccggtatcacggcgctggggctctgggattgatggacgtgggtgccgcgctgcaggttcggtgactgctgaggatctccgcatggccgagggagagcctgcactggagtattggtggtaaggtgacccgacttgtgggcgaacacctgggctgcgcgcgtctcccatgaagctgcctactgctatgttctcctctgctcgtcgagctaatcgctcttgctcctcgtggaatgctgtttcgggatcacggcgaatatcactttcaagttcaccaagccagaagggaaagctgttgacatagtcttcaaacagtgaggctacgccgtggacgaacttggagaagcggggagcatccttgacaaggtgggagaccatcaggtccttgacccactcggtgttatgggccttgcctcgaagctggatctcgagcaaagcgtgagggaagcgagtgatctctccagtcctgatagcgctgaagggataagtcatatcggcatcgtccaagtcggtacggtgccactcggcaggatcacgacatggacgttcactgtcgagggcatcttcccgaatgagcgcgaggttggtatcgagggaaatacgaattcgatcattgccaggaatttggaaggcggtacgcgtgtagttcgcccggagcatgggttgcaggtcattgtccttgataaaggactgcagctcatccacgtcccttttcaaggcttcggcggcggccgactctccattggtcgaatcctccatgcgatggacctttttatcgaagcggtactcgccgtccaaaaactccttaacgtgcttttctttgagttgcaccttgacttttcgactttcgtcgtcgtcggtgacaatcttcttttccaactggatggtaggtttgtctttcagcgatcccgtccagcgcagtcgcaaagatccggcttcgggtgctcgtgcgaccttttgattgtagaggtcaaactgaggggaatcaaaatagagagaagtaatggtggggtcttcagtgatggtatcgaggtccttggaagttcccggcctgtagataagaaccggcaatcgacgaaggatgtgagtcttgacctccaaaacgttgtctgagtgaacccagaatttgtaagacgaataggtctcacggccaaatccatgctctgtctcccttggttgcacaatgtcctggttcagagtctcccgaacaaaggagtacatcaccgagaggcgatggaccagcggcgaatagtcttccgagttgaacggcagttgtgacagtcgcacttggagcaaaggtttcacccgatatcgggctcctcgtttgcggtcatgcttctttgcagcctttaggaagccagtgaagttgattcggctgtatttttccaaggcactgacttccttggtgatgctatcaagttcttgcagaacttctgaggcaatagcccttttcttctgttcatcgagaatgggcgtttcttgctccggagtagatgccaaaggtcggagtttagcttcacatgctgttgtccgttctcggagttgctgcgatgtctctgcttggaaagaattgaccttgtccagctgtacattgagcagttcttgcacaaaggcttcctcatcttgctcagtccattgatcgtcatcggagtcactgtcgtcttctgcgtcccgggtcacatcgttctctctcagcaaggtcttcagcttggtgtagtcaatgtacttccctttccagggagggtacaccgcagcacggagggtttttccaaaccgcattttgagccagtccggttgtgcagtcgttactcagagatggccgggtggtctgattaggaggtttcgaaggaaggaagagataagagagagaggattgagacagatcttcagttagggaaaacaaggtaagagctgaggttcaactgcagatcgaaaaatatgtgcagacgccaaaagaaatagctcgttagcttttaaaacttgcagctttagaccgaaagcgttcgatagccaccgatagccgcacgtgctcattggatgtggccaatcggattctgaaaatggaccggaggatgaccagctattcggataatctctgttccgacggtattgtatgttactttacggtacaggagtacgggaagtacgggctagaccgatatcgccccccgtcgggaccagagagagggacgtgcacatggactctccgataccgatatccctccacaatccaagggatcctttgacctcttaagtatagacttgatggagcccaagtctacacaaacctcgggtctgtcccataatctgcatggcgtattagccgagctacatcgtcaaccttatccttacgtcccaaatcctccaacctgcaacaagcgcgcctcggttgccttgattattcgggtacgaccaacctacgaccattggcccaactcaaaccccacaaaagatgcttcccagccagttccacaacgtttagatgagttcttctcacagcaatgggtccagcatggcgaaccggaggttctgttcatcaagcgtgcttcgcgcgtgggtgaccgatggactggtcatgttgccctaccgggcggaaagcgagacccggaagatgcagacgataaagctgtagccatcagggaagcttcagaggaaattggattggatttgacaacggaggataccattagtgtgggcaacctccctgagcggctggtcactaccagctgggggtccgaaccgtgcgaatgccattcaccttcgcctctgagaattggattactgacttgaattcgcagcttgatggttctatgtccctttgtatttctcacaactcgcagcgactccccgacacttcgattacagcccgcggaagtagcgtcgacacattggattcccctgcgcgccctcctatcaccgtcgctgcggaccgtggaatatgtggatatgtcgcagcgcttcgctcgacaaggcgggtttctggcccgtattgcaattcggtcacttatgggctggatgcagttctcggccgtgaggctcctcccgtcggaaacccatcaatgcactacaactccagggtttgttcccgaagagaatacactccaacctggcctgctccaacgtttcaagggatggtgtctgagtgggcaagcggagtccagtgatgctgcccatccgctgctcctctggggtctcaccctcggcatcctggccgacttcttggatatgctccctccccaccaagctgtgcagttgtggaaatatccaacatttaccgtgccggatctgcggctgattgtaagcattgtgacttataatctacggaagcgtaatgcgctcaatgtgagatcgggtgctcgtcctagtaacacggccgctgatagcgaaacggccgcactctcagtcacacaggagccggatctcggacatgatcacaatgaagtgggcatcggtggtctcggagtaggcagatattatggtccgaccgaccaagcaagagatgggacttcttatgctgttggaatcatgctgcgcgggtattatgaccgcttgcgcatggcaatctgggttttcctggcctggcgtgtagccattggttcaattgttggtatttcagcctggcgaattcttcgacgactgcgttgaagtgtacattagcaatatacagttgcaataaagatgtaaataataaagatttcccgtacatcgaggtacatcacatgtttgggacatgcaaataccaaattacataaggaacagatcattacggcattcggtcagattagctcccccacatcctctctggggggtaaacattgaacattgaacattgcacacgactatcttcgatttcaccatctcctatactctactcattatggcggcagctcaaaaactttacccacgaggaacagtcaagcgcattgtcaaagcccactccaatcggagcgtgagcaagaatgccgacattttggtacgttgtcgtcctgatatcccctctcttatccagttgctaatactacctttctagatcttcttagactatatgctattcatgcaagagtatgtctccatctatccttgtggcggttgcaacccaattggcactctcactgccgccattattggactggcgataagttaacacattgtaggttaatgcgcgaggcatcgattcagtcgcgcaagtctggcgaaaaaaacatttcagcgaataccgtgcgcaaagtgactgaggtgcgtttggtcgatctaagagcttctccggaagactcgtgagaacacacagctgacaagtatgggcttttttagaaaacactgcgcaaattccagggatagaaaagcccagaacataacctcggtctgcccattatggcgaatacctgcctagcatggttgtgaaagacgaggggatcctgtactaagactggcttgcattttgtgatattatggcgttgtgggcgaatgtgaatatgataccctggagcaatacaatagaagaaatgaataaatcacaaccaacagatcagttatctcataaattacgcgtttaaagatatagatagtactgtgattgcttaattgcttcgcgctacgcacgcgtcgaaagagagagagagagagtctacttaaagccagtgggccacaccgaccaaaggctttccgacccgcatgttgattcttccttcataacacacgtctttccttcaacgttatcgcgtttaatccttcattccagacctgtacaagcttttcagaaatactttaatatctgtgttacccacattcccatcatgcctcccacttccgctacccagaagctcaaggacgaggagaagggctcgcgagcttcaagcgtctccaaggaccccgagggccccaactctgaaggtcaagagagtacctacttgaaggagctgcagaagtatgttcagaatcttatgaacccagtggcgtggttattgcctatgcgcaagtggaagtgacctaactgctttgtttagaacacttcgcaatgccatgaagaagttggtgagttattttcgaatgatactttggtttcgattgtttccattgacaaattttaacgttgctatttttctgactagaactccctcgccaaagtcgacgccatcatcgccgagaaccccaacaagtcgcttgatgaactgatcgaggagaagaagatcaacaacgaccagaaggcacaggtcctgaagaggccttcccttcaagccaccgttgctcaggccgaggagcagattggccactacaaacaatttgctgtccaatacgaggaccgtctggctgctcagaaggctgcgcttgtcaaggcgcatgaggcggagctcgaagctgtccgtaataacgccattgctgatgcgactgaggcctccaagaaggcactgcgcgagcatctctataccgtgactaagttcttgtgcgccgcggccatccttcgacgcgacggttacaccatcaccaccgagagccgtgctttcgagggtgttctgtttgaggtgtacgctggcaaccagtctgcagtcaattcgcttctgaagattgctgagggtgccgatgagaaggtcaatgctgttgagggcaccactcttgattttacctgtcagtaatgaatttcccagccccaccctcaccgaatatctttgaatgtgcttgctaacattatatctatttagatggcgacgtgaagcaagcatccgacaagttcgctccgcctgaggaggttcccgaaattgcctcggaggcaaccctcgccaccaaccctacgaccgaccctaccgtggctaacgcaggactgaccgagctccaggatgcctcattcggcgccgaggcccagcctgcagcttcccaagcggaccagttggctcctcctgcgcagactctggtttctgatgctgcaaactctattgcggagcaaacctgggctcctacttccgatgaaagtagcgaatgggtcaagcttcctcgcaatccagatgagaccgacactggccttcaggctactccagctagcgctgatgcgggtctgaacaacggttccgttggcgctgatgtttcgactcaaggtgagaacgctgccaagtctggtggacgccgccgtcacggacagggacaccgtggtggccgaggccgaaatgatgctaagcgtactggtgagggccgcggtggcgaaggccgtgctggcgaaggccgtgctggtgaaggtcgtgctggtgaaggtcgtaccggcgaaggtcgtaccggcgaaggtcgtggacgtggtggacgacgaggtggtcgcggcggacgtggtcgaaacggtacaagcggtcctgcctctggctcagcggaagctcccgcctccagcgagtaagagtggcaatcttaggatgtcagttggaacatgctgttttgggatcttgtctcgaagtcgatgttccgacgagagattctaggtctgtctttccgggactggcctcagcgatttctggtccgatgtgatggctcacgaacgcaacgaattttcttcacggagagtcactttgatctcttcgtctggctttgccaaagtcttcttgaccatgtcctgcaatttttttcagcgtgcatattcccgatcatcagagagcttctctcacgacatacatatgtattctatgctattgttttatcggcgcttgtgaacggaccggtggacagggcttaggtcgggcatagatcgaaattgatcataatgagtgcactattactttccaggacttgctgtagatacccgtattttacgatttgggtcgctttagttgaacgaaataaggtctactaggtctactacttgaatacgtggatggtagtcaatggcgtatgataactagttactatagatgtactccgcagtattgtaccatagtcagtcacgtgatgtaactagcttggcgtaatgtaatgatattacacaagaccgaatcaagtgcggggcaattatgcataaaataatgtaaataacggaatacacttgaaatgcgcttgtaaaggcgtgttccgttattactagcgtgttttaagatgaaacccgtttttagcgcagggcgctaaaccacaataggaaatgcataccgacgcccagtggagctcctggcgtattcaatctgattaaaatggtctttgtgctcttgcacaagtgtcaacttctccagattcttgtccttctgctcatttttggttctttccgccctcctccttatatcttctactgtatatacggcaccagcaacaatggccgtcgctggcgcccaacgtaagggggtgctgaaggtgttgatgctctcgctgttgttagatttggtaagatcaaggtacccattcaaagtcaacaatcacatttattcaattaacaatactttcagatctcctttacattcattctgcccctcttcccttcgctgctatcgttttatcacgcgcaagatccatcccccgattccctcctcaaccgcatcttccactacctaaacgcctacaaaaattcctttgcgcgccccattgactcgcgctatgacattgtactcctcggtggagccctcggctctttgttctccctccttcaagcctttgctgcacccgtcataggccgcctatcagaccgtcatggccgccgtcgcaccctgctcatctccatgctcggcaacctcttgagcgtcgcgctgtgggtgtcagctacggacttccgtacattcctcgccagtcgtatcgttggggggatgagcgaggcaaatgtgcaaatggtcaacgccatagtggcggatatcacagacgaggagcaccgcggctctgctatggcattagtcggggcctgtttcagtgtcgcgttcactttcgggccggcgctgggtgtggcgcttagcagtatcaatatggttgccgaaaacccgttcatcgtcgctgcaattgtgtcttttgctctgatatttattgagactgtgtatctttgggcctgtttgcccgagacgcatccccgattgacgacgcttcagatggagagcaaaagtacctccaccgagaataatgatgcgttgggtaagaaaactgaagataggagcagtgctcccgctaagcgcacccatacaaacaatccggcccttctcaataccctccacttcctcttcctactcccattttccggtctggagttctcccttcccttcttgactacaacgctctacgcgggatcagccacaacagtcagccctgctgcattgaacggacgtctcttgtccctgatgggcttaatcgcctctctcctgcagggtaccctggtgcgccgtctcccgccgctggtcaccctccgtgccggtgtcgtggcctgtaccatatcattcttttgccttgctcgcgtttcttcaccttcagctctctatgccgccggtgctttgttggcggtaacgaccgctacggttgttacgtcactcaacagcctgggcagcttcgaggcacaggatgcggatcgcggcgcggtcatgggtggtttgcgggggtggggacaggctggcagggcgactggtcctattgtgttctgctctctgttttggtgggctggccgtgaggctgcttatactgctggcgggttcgccatgtgtgtcgtcacagttgcagctttcagcttgctgaagtcgcctgctgtgcataaaaagactgaataatgtatatagaagcatactaataaaaaaatggtcacaatgtcttgctattcctttttaatacatcaacttatcagtatcagctccaaaatatctctgcctcttctagcttgctattcttcactcagtctggacatgtttctcggtgttatagttaggaggataacgggtagcagactacgatgtggcacaattcttacaaaacgacaattccgtgatttttcattgctgtctggttttttcaagtccgtaacagggtataatacatagaagagtggcgatagtatgtctcaaggattctaacagacaaggtcaagtgaaagagaggacttcaatatcaaaacagcccatctctcgacacccataatcaggcgccgtaaagccttgagtaagaaaacatattcgagctatataaaaaagacacaatacagcaagaatgtaaatatgaacacagaagccatcgtacgttctttcttgtcttcgagatatttcatttgatgacagattcgctcgagttatgatcgaatatgagggtgaagtcacgacctccggccactgttggaagcaagcccatgactctcaccagtcgccatggcaagtccagtattggcagccgggtccaacgagccacgtgccttgccaataagccagtcagtgagagtcacgaatttagcagtccggtcccagccgtccgcttcatcggcgtgctcgatagtatgggtcaggatgcgaccctcctcatcgaaagaaaagataaagatgccggtgaattgctcttcctttgacaacttgaagataggctcttcaccaccgagaaggacactcaagccattgttggtgccttttgtggagttcgagagatgactattttgtgagaatggggcatttttcgagggatttgtagaattggtattccaagaggctgggccatggaaggggcggctttctgttcgtggctcagttttccaccgtactagtaggcgctcatcgccgcagtcgtgatgggcgccgtgacgcgtggggtcgagtagcgtcccggctcgtacgatcctttcgctgagaatctgcaatttcacattgccgactagtggcacgctgctccatgctaccgggacagtccataatgccgcgcgatatagtgtgcgtcctttgacggtagggaggtgtggatgtgtggatgggaataggtgaaggttgacactcggggcgaggatttcggtaggtaaggtattgtacaagatggtcggtaaaaggggtgacaggattcgtaaagctttgatcgttagttgaacggctttttggaaagtgaatgagacagtgagtacatactctttccgagtttcaaggttctctcatctggcggttggtgatcgtttctcctaaggccttccacatgctccctccgcacccaagccggggagaaatatgtgactggcaaaggtgcaactgaagttgaggtcaaccagggctcactgagaaggccatgacgaagttgcgccagtcgctgtcgcgaaaccgaagcaaaaagccggccagagacagggctcttcggctgattgagaagagacgtgcgcagagagactagcttcggcattctgcattttaaaagtatgttgtcaagccatgtagataagtggaaggttgaagttggtcggagtcgcggagtcggagagtcggggaaaatgacgttgtgggagccaatcacgatgctctggtatacaatttgattcaacttatatttactgactaggacgattcgtgacaggtctacagcttcccggggactaattaaaagtattattcgtaatcccaacctcaagccaattcatcatcgtctcccattcccatgacacgtcgttcagccagatcgcggatcttgtcctcaagaatgccacgtccataacgctgtgcaattttagcagccgcctcgagcatcttaccgttgcggtccgtcatcaaggccaccagctccagcgccttcataccacgctcctcgccctctctgcattcaatggccagcatctgcagcaagttcttatccaattcgagctccctccgcgccaagtcagagcgttggcttgccgtcgcattggtcgatgagataagatcgcggaagagcgacaaaagcacatttccacgtacgaatgactcctcgaaacgagcgccctcagccgccgtgtctccggattcgctggaatctttcggaagagtactggcaaccgggatctggaagtcgaattcactgagcagcggccgtggaaagtaagggttcttgtcaccacccttgaggataatacagtggaacttgtcttgtgcgacagccaccggccagtatgtttcttctttccgccctcccgcgagacgtgccatttgcttcgtgtccaggagcggtacccatcgggcttggccggatgtgcgccagtgttgcagaactagtaggacgccagtcgactcgtatatacaaggatcctaagaagatggttaattccatagccaactcttctgtttagatggagcttaccccattatcagagaaaaaaacactctgtagcgaagccccttctggaagagcgacagtgtcttcgttttggcaaatctcgtcacgcttgacattctccaccgtgtatcgtaaggttgcgtggccatcaatccctatagggccgttgccgatgctcataatgtagtcgcgccaggccgcgcaagtcacggcttggctcttctgtcgatacaccttgaaaggtgtcccaaagagagtgtacactcgaacatagtgctttgatgtcacagtgacaatgtatgaatcgctgagtgccagagctgatagcgagaattagtaaggtgaattgtgtagtcctttgagttcttacctcgaatttgttctccctcgggcaattcggttcgccagtccgctcgcgcagtccacgtctcatgtggcctgtagaaaatagtggccggactgccatccgaagggttattggcaaaaagtgttccgttgtcgtctatatccgatcagccaaaacccaacacaaaaggataagcggaaaactcactcaaacaagccttgtcgtacatatacggatcagtgaagtggaaatctcgatgagcctctcggtcatagaattccacagtaacagtgtggtgtgtctcctggtccacagtccaaacagctcctgtcaagttcaggcctggccaagttagcaaatgcactacaatgagttggaacaagaacatacaaagatatctcctactcccagcccaaggcgtgctaccgggttgaagaggcagatgggccttgggcttttcgaagccagagtagaggcgtttgttactagtgtcgccgagatcatcgagatcatcgtggggccgcttgccataaatatttaactcttcatcggcatagccagccccatcatcatcctcgatgaaatcgatcatctggtcatctccaccaaggatatcatccaatgagtctggagaccctcttctcgcggctcgctggatggcctctttggaccgctccgtcagtgtggttcgcccaacattgttggagatctcgcccagaggcccaagtaagataggagctgcctgcagcggtttctgcagcagagactcgtgatccctcggtacaaagttatcatagatgaaaagctctccatctgaagttgtaaatgaaagtgagtttttggtcgggtgccaggataggttcaagacatttgcaaattcgtatcgctgcaagatcttttgcgtctttgcttcccagagcacaatatatccatctgcagctgcagacgccagaagagatccgttcggggcccagctcaaggccgtaacgtcgccggtatgaccgccagcaaatgttttctccttcttccattccgaggttgagtagatcgagatatctctggtcgcttccgcagaagcaaatgcagtaccatcaggatgccacactgctcttgatgtcgcctcggcatctggctccagtcgtcgaataactccatcgagtttgcggaccagctccggctcctcttcgtgcatggagtatatatagaggattccatctgttccggatactgttgcatatcggccactgggatcgaatgtgacatgcttcgttcccttagactgttcccggagatacttgacttgcgtcatgtcgtcgactttcacgattttgactgtgagctcactagtccaccagtgtcagcatccaatccactgtctggcacaatctctacagcacttactcgcttgctactgcgacccattctccatctctcgtcactgcaatgtccctgactggcaaagcacatcggacaagcaagttttgtattttgcccgacatcatgtcgtacttccagactgttccgtcctcggcacccatgataaaagaccgattctagcaatcctgtcagacctttccttcgatgcatcgtaagtcttattccaacataccgtagcaccaatgccgaaatgcgcgtcaacaccttcgtcgatcgtcttgggctctccatcttcgccgaccgtgtaaacacggatagccgagttggagccaccagtaatgattcgtcttccgtcgggtgtgtaggccagtatcgttgtgccaggtgtgtctatgtggaggccgccttgtcagtaactattgtagtctctaggtcatcagcatgactcacgggctgggcgcccccgcgggcgaagagggtcgaaactcattgcaaacgaggcttggcgtagatatttcaatcaagatgcaactagaaagcctggagcatcgttcgatcttgatctggtggatcacgaatagccagggatctacaaggtcagacgcgtccgcgttacgcgccttgattgatttaacccgattggggaatattatagggctcagggcttagggtaagggccgctttctccagatattccatcttattgttcgatattgagtttgtagctgaaatagactctaagtgctagcacctccagctgtcaggaaatcaaaatctgctccctcttgtgcttgattcactgatcgctcatacaacccgcggtagcctctcctctgctttcttacctgcgtctctcccacaagactctgtctgcgtgtctcgattcgagtctggattactgcctcggaaacttccaagtgcaacttcctagtttcgatatcgcaaataatcaagtcaccggtctctaccacgccaaatggtgactctggtagcgcagcttcaggcgagatatggaggataatggttccgcccgcggtccctgacattcgaccgtccgaaagtcgtagcatatccttcactcctgcctctgctagcttctttgggatcggtataaggccagcctctggcatacctgggttgccaatcgggccaatgtttttcaggaccagcacactgtccttcgtcacaacaaggtttggatcatcgatccgctgagcaaggtcggccgaattctcaaataccacagccggtccagtgtgtgatagtaagtggcgatactttgacgctgatgctttgatgacagcaccgtctggggcaagattgcctcgcagaacagccaaggatgacgcgggaaacagagggtctgacattggccgaattatctgttgcgcaaaggaaagtctcttggactgggatgcatcgaggacctcgcccagcgtttgcccagtaattgtcacagcagataaatggagcaggggtcgaagcacttgtagcagcgccatcatgcctcctgcattgtggaaatcattcatatagttatctccactcggtttgagatcaatcaacagtggggttttgcggccaatctcctcaatagtgtctagagtgatcactccctgcagttctggatgtctatttgcaatagcgagcagatgaacaatggcatttgtcgaacccccgatagcctggagcactgtgatggcattccagaatgattcctttgtcaatatttcttgtggctttctcttggcctttgcaatcgcaactgcatttgcgccggtctcttcggcaattcgcagtctcgcagatgatactgccggtgcagttgcgccccgaagcggcatcattcctaatgccgcagtcacacaagccattgtactagcagttcccatgacaccgcatgtccctatctgagcgagcgatgattgtaattagtgaactgaccttggaaatgaccgtgtatctgataagagcgcatctgcacataccgtcggagcaagctcttcgttaatggccgagatttcctcgacgtccatctcacccgctcgaaaagctgcccaattgtttcggcaatcagtgcaggctccaatacgctggccgcggtggctccctggcagcattggaccggtgatcagtggtaggattggcttgttggcagagataccacccatcaactgagcaggaacagttttatcacaccctaaattctgtcagtggctattctcaatactaaaaaaacgattggaactcacctccgatcattatacaagcatccaatggctgggcccggatcatctcctccgtatccatgctcataagattccgcaagaacatgcttgttggatgcgagaatgattcagccacactgatggtagggaattctatcgccagtcctccattgagttgcacgccgcgcttagcagcctcaatgagctggggcacattggcatggcagggattgaaccctgagaaagtgttgataatgcccacgattgggcgtgaaagcgcatcttctgaatagccaagtgccttgataaacactttgcggagaaagagagagaaatgaggatctccataggatgttagaccctgtcgaagtccagatgtggaagtgattgggcttgtgagatcgtagtccctattggaatcctgttcgtccattttattgtatttccttctgaatagcaattccacagaggactatcgaggaagtatagacacctgagttaggcgacttacatattcccctcctctcagtggatggtgtcatcggaacaagcccgattcggatattaatccgggccgagggggttgtacatagaattaaatttataagatctctctctctatgataaaacgctatgcaatacttccatgtaatctataccctcaacttcatcctcacccgcagctccttggtcggtcggaaagctccccagctagtcttgtgtcctggaactgagaggattttaccacttgtgggctcaatatcccataaggccacaatgccagcagtgaaagtcaaaatagctcgctcgatgaggccattgttcgtcgatccatacaatccgtccgcaaagggagcaatgatgctttgatcagcccgttgttttcccgttgcaggatcagttacgagaaatcgtaggggatcatactgctctggatttgagaagtatcgagcatcatggtaatattcaccatggggcacaatgatatcctcgccctttgcaatcttgtatgtacggggctccgtcaggccataggccgcttcttctgccgactcggaaagggtcacatcggacgccagcttcttgaacgagattcctgctgaatgaaggcgcacagtctcatagtaacatgcttttaacagcggacaagatgtaagtactttttcaatatccagagagagacgaggaggctcatcaaaggggaaacccgtctcctcgcgagttagcctggaagccatcacgtaagaagcaatctctttgcggacttgctcgagaagtgaaggttccgcaaagagatgggtaattgtccaaaaagtgatcttggtcgtgtgttcaatcagatcataatacagagacaagtgccctgcagcactggcacctggagatagctccaatttgcggaaagtccgcattctgtctttgaccaattcagagacatcgtcaagatcacgcagttcaatgccggggtcaatcccatcgtcccaagcagtcaaagctcggtgaaagactgaaaagatatggcgaagccgatcactagccgcatgtcctgctgaggctgctggatgcggggcccatcgaggagtgccgacgaacaatgtcacaaagcaatcgtcaagtcttccaaggtcttctgagagattagggaaattctccacgaatgtcccacccatcaggaaagtagaagtgatgtgtccaatgaaattgctcacgagtgcaaacaaattggcttcacagactgtctggtccccttcatcgggcatctcaactccactgattccacgttcccaggggcattggtcaacaatgctccggcagaagcttaccaaattcggcatgtcacgctgcaccaaacgggtaatagtagacgaagcttcagtgacaaaggccttttcgttgagaatggtagtagccttgtcgctaagtccttggttacgatccaaatccagattgcggatgaggctgcggtcaccaaagacgttttgcagagcttgatcgagcacctggttgcgtggcgtggcagttttgacagagaaaacagtcttcatcatagatggagaagccacaacattgtacttgacaccgcgaatgtaaatgccaaagacaggctcattcatagacaccctataatcctattaacagacgtctaggatggtaatatagtggaagaccaaccgagttcttgtaaagaaggtaacatgattccataagaaggcagggccatgtccaatccagggaaaccaataaggtgctagtcgcaccgtctgtgattttgaagggtcttgctcacgtcgacttcgaagccccgagataatacgggttgtgaggcatacgaacaccacaacagcaaaaaccgttgaccaacttataccgaaatatttctcacggacagtctgtataagactcaaggcttcgtacctctccattgtgattcgatgttgcccaaaccaaacactgccgagcaaggtagcacggttctacagcgccagcacccactcaagggctcgaggtagacaaagaggtatgaccggcaagtttggattgattcactccagagatttttatttaatatatccaggtgaagggtgaagggacacgatggcaaacggaggccggggcctttttctggcttactaagctcgagggtctcagctgggttctatttttgttggttttcatttgaatgtcaacattttcaaaatatattatgatttcgttctatataatgataggtgattctcagataataatagtcggatcaaagttgatatcacttggttcgcgtttatacttcgccgagaccgctaatagatctatatctaaataggagtccaaagaaaggactggatttagtactttttgtagtaacggagtaagattgagacgagatttatagacagtagctaaaagcttaatattccttctgcaaagactttgacaaggcagcactttcactctcatacttgagaatcttcgattgcgatccgtgaactttgcgcagaagccactcgatccgcgacgttagctcccaggggtactttggcagtgagccaaggacctgcagctcctgttcatacttcgtgatacttgaattctcgttgttaatgagctgtgagaggattaacaagtcaaggcggccctgcagggtcttgttcgcaaccagacgttggaaagccgcgcgatacacgggtttgcccggtttgacgtatcgtgggaatcctttgtcagtcccgatggagacaagctctgcttgctctagtgcccggagagtgacctcgccgttgtccttgaatacatcgtcgaggaggactttgttgtacaacaggtttccatccttggagtgggcgatagacttgatcagatgccacgcctgctcacgggaccactggagtgtaattgactctgttccgaggatgaagagcttcaggatttcagacgccgactgttcaatgatacggtccacggcagctatacaatggttaatagaattctccaggtagaaaaaaagataaacataccttcaggtgtctctccggcctcaattcgatgagccatgaactccaagtcagtaactcgacctcccagcactttgatacaagcatccaagccacgaagcgtctctttgcgccttgcattctgttcatcgtcactatcgtctgcctcggcatccagatgactcaacacgaaacgacgaccaacttcgagcgagcagtcacctaaggcaattgtgcggaacacttggttaggcatggctttgctcaatggctttgcaaacgaggcatcagtcgtcaagaagatgacatgggcgatatttgcggatgtcagaccagccgcccattcggtaagtttgtcgagcacgacactgtcatcctcgtcatagaggaaattgtcaatcacaacgacaggtctcacctcgggatgagcctccaggtactcatcttcggacatgttgaaatctttgtcctcctttcgtctaccttccaaggcgactcgcttcatagcgacaccagtattctgccagatcttgctcaactgcgcatctagagtctcggagaagccggctttggtgccgatcattccctgtgcagcaaggtcaatgaagctgctgatactgttcatccaagagaagatcggtcggtagccgacctgagcggctgctcgtgaaatcttagttgtatcaccccgagcatcttgaatttgcttgcagtcaatgatgactttatacttgtgctctttcagggcttgttccaaaaccaactcgcgtttccctgagccacgaggaccatggataacaataaaggtctccgcggtctccgttagccaggcttgcagttgcgcaatctctgtttgtcggtcttcccagatagctgctagacctcgcgggtctgactttcgcttcccaaatgagaacaggctcgctttgctggcttgtttgcgaacccactgtagcactgggttctcttcactctggaacgacgacttgattttgagagtgatgaagaacgtgcgaattggatcgaagatgatgaccgtgatagtagccaacagagcagctatagcagggatcactagtctcggatggttcaaaatccaatccctgatcataaacagcttgatcttgcgctcgtagttgatcttgaacctcgtaccggacttgccacctcctgcttcttcggaaacaataaatccgtgcatgcagtttcttgccatcacggcgtacctagggcgctcgaatcgcagaattgcatatcgtggtaggactttcgaatctgagggctgtgtttggatgtccagaattttgccgtaaggtcggaacaatgagtataaagactcttgggtcaattcggccgctgatttatctggcgacgttggtaagaactccacctttagggtctggcttgggattcgatagagatcttcgatccaaggcgttccgcgaacaaggtctgcatcgactttcaggaacggattgaaccagggcttaactggattggttttcaaatgctctttgattgcattttcgatactttcgtggctgatgtccgacttaagtgcatacttcacgaatgcgcctccctctttgtacctcgtcacgacctctttgatctccagatttaaatttgtgggcaaaactcgatgaacaatacgagtcgggtcggctgccgctagttctgggttgttgactcgtgccaaaagtccctcgagaggctgaatatggctgaggggtcccctcagcagccattgtagtcggtgcggaaatatatctagggctagttagtggatagacatgatagcttgcaattagtcggcgctcactattgacatagataatcccttcgttttgtcctactgtaatatgtcctgacctgatagaagatgtgcatcgtatcatcgagcgtccccaaaccggaggtctccaccagcaggacgcattggcgctgatatgagagcgtgtgggagaccaaaaggccaacggaccttttggtaaagatgtcgatctcattatggtcacagacacataccgaatagagagagaaagaaagaacttaggagagcgatcaagttgtgtttgtcaaattaatgacgtcggttcgtgattatcggagtgtgattatcggagtcacatgacaatattgattaccgcgaaaaagataacctcgcgatttcatggatcgcgatagatcgaccaattctttctttcacaaaacgaaatgggctggctgtggagctcaactcctaaggatcttccgaaggatgttcccaaggatattccattcacaattcctacggaatcagtaaagcagaatgcaccatcgaagaccttgacccccgacgaacaagccgacttggaattcagccaaatcctggccgatctcagagccgaggattcatcgctctcaaaacgaacagggctgactcctgatggcaatccgctgccagaatcccaaacaccttcatcgcccatctctcccgagtccctctaccaagataccatgtcctgccgcaatgccttcgactacgccttcttctgtcagtccttcggaggccaatttgtgaatgtttatcgatatggagaattacggtcatgcagcgatcactgggataatctatggctgtgcatgaagacacgaacttggccagacgatttgcgcaggagagaaatacgggaccacaaccggaagaaagcgattaagtacaagacgggccccagcagtgaagatgtctgggatgtgcgtctagacccagccaaggactcgttcaagggagattttgccaccatgtggcaggagatgaaggctgaagatgaagcagcaaaacaacaggcgcaacagacggcttcatgatgtcccctgtttctcttctctccttgttacgatatgtagatatactcccttttgtttcattccctcatgtataatatgatactctccatttcctttgtgtatcggcgtttgttcgatggtcatatggaggacccggcggatccgcatatagcgatttagaggctttttgttacactgtatgatcttatattctcagatttgtcaatctgtctgtacgtggattctataagtctgccccacggcctataaaactctattgaagggagagaataatgctggagaaatagttgattggcgcaaaacgctcgaagagatgcttgaagaacgccgcataaacgaatgacctaaaattagaaaaaagacccccaaggccgtagacacaagagacatatctcaggatatcaataagaaaaccctaaaacatacttacctcatattatttcatagcatcgccgtgcgtctaagagctcagctgcgaagcaagcttgtaagacttattgctaagaacaattcaataagttagtatgtagcaattcaatggaggacatgtaaccaagatgatgttctccaattctctaattactcaatccaaacttcattctttcattgctcttcatcttcctcctttatcgactgcagtcgtgtcttgatgtgcttttttaatcgatcttcgatttccgctatcctagcattcacagaactgttgctgcctgtgctgcatatagaggaggcaacactagccgtaggtgaaggagtgactcttcgcagagtcacaatctcgatccccggaccggcatcgaagttcaacttcttgctgagtctctttaccttggggctagtgggatggtcaacggtgagcttggccatagcagcagtgatatcagcgatatcagatggattgaatacaataggggtagatcgaccgcccgaatccctggagtgggaggtaagaggcctggaacgatttccggtccttgtggaattcttgcgcattgttgttcggaggctaccttcgacactcctaccgcgccctgatactcgaccatcgttatagtggcggatggaccgtcgctcaccgtcgagctcgcggtcagtgatgaagccgtttggattgagatcactcgcggcctcggttgtcttcttggcttcgttgtccatgtttgcaatggataggacctgtgaatctgtaaaataggtaagctggattagctaaaacgaatgaatggaatggaatggtccgagaaagcaagggatatgaggacgattatatagttgagccatcaatgccggccatgcaaatctgacaaagggaagttaccaaaggaataagtacaaagacgttgttgactcttcagctctttgttctttcacacaaaagacatagagagcatctagctttagagactaatttcaagtaataatggaacatggtcagatttgcagaaaagctatgtacagcagaaatagagatcaccgaatggcagacgctctaaacgccttgcagacctagaaaagaagagaaagaaggagaaacccgctgaagcaaaaactaaagatagaaagaaaaaagtagaaaagtagaaaagcaaaaactgaagaaagcgcagtactgaagccttttccattcgcgcagagaaccaaccccataaatcccgtttatgccacaaatttatcccatttgatgaacttttccgcatcaaaatgaaacttttatcgtgataatggccgtcaaagtcgtaaacatgtcctgcatcgccgctagattaagcagcaacctcagtgggttggggaacggagtcgatggcaggacgacggacgataccaccggtgactgggagctgagagctggttccaatgaggaaagcgtccacttcgcgagcacactggcgaccttcgttgatacccctggaattatattagtaaattgctagttataggaattcgaggaaaactcaccagacaatcagagactgtccacggcgacagtcacctgccgcatagacaccgggaaggttggtcgagtagtagccgggaggagtcttgatgttcttgcgagggtcaagctcaatctcatcaccaaagacacgatcctcggggcccaagaatcccatagagaggagcacaaggtcagcggggaagaattgctcgctgccctcgacggtcttcatgtcccagccgccggtagcgctcttggtccactcaactcggacagtgttgatacccttgacgtggttgttgccatcgtccacgaactcggtcgacatgacacagtactcacgtgggtccttgcccatgtgcgtcttgacctcggtgtgaccatagtcgacacggtagatacggggccactgaggccagggattgtcacgggcacgctctgggggaggctgaggcaacaactcgaagttggtcaccgacttggcaccatgacggacagaggtaccaatacaatcgttgccggtgtcaccaccaccaatgacgacgacatgcttgtccttggcagagatgtattcgccatccgaaagaccagagtcgaggagggacttggtgttcttatgcaagaactgcatggcgaagtgcacaccatctaattcacgaccagtgaccttgagatcacgcgcaacagttgcaccagtggcaacaatgacagcatcattagtggcacggagagactgcagagaaacctcgcaatcagggccaacagcagtgctcgcaacgaacttgataccttcagcggccatgaggtcgatacggcgctggacaaccttcttgtcaagcttcatattggggataccatacatgagaagaccacccattcggtcggcacgctcataaacggtgacgctgtgaccagcgcggttaagctgatcagcagcagccaagccagcaggtccagagccgatgatagcaacggtcttgccagaacgggtcttgggggggcggggaaccatccagcccatctcgaatccacggtcaatgatcgcgcactcgatggatttgataccgacggggtcttcgttgatacctagaacacaggagccttcgcagggtgcagggcagacacggccggtgaactcggggaagttgttagtcatcagcagacggttcaaagcatcctgccactgcgccctaaagaccagctcgttccacttaggaatgatgttggaaatggggcagccagtgtcagactggcagaatggaacaccacagtccatacaacgggcagactggtacttgagctcgtcctcgctgagacggtgggagatctcgccccagtcgcgagtacgggttgttgcgttgcgatacttctcactgcggcggctgtatttcatgaaacctcttgtcttgtccaagatcaacgctgatcgctttttatcggtcttggaatcgctaatgctgtcttcaatgtctagcaagtcagtcttcttggagtcgtcggccttggcctgttcggttttgaccggggtgctaggaagctggggaagagtgaattcggccttcttcgcagcctccgccttggcagcctcttcctccatgacgcgcttgtagtcggttggcagaaccttgacgaagtgggggagagcacgagtaaagtcaagcaggatgcgagcagccagctcggagccagtgtaatggtggtggtcttcaaccaagccacgaacaaaggcaatctccgatgggtcttcgatactggagatctcaaccatctccaagttgaccttggaatggaagtcctggttcttatccagcacgtaggcaataccaccagacataccagcagcaaagttgcggccagtaggtccgagattgagtacacgaccaccggtcatgtactcacatccgtggtcaccaacaccttcaacgacgacagtagcaccggagttacggacagcaaaacgctcggcagccataccacggaagtagcaagttccacgggtggcaccgtagagacaggtgttaccgacgatgacgttttcttcggccttgaaagcggctccgcgcggggggtagacgatgagacgaccaccagagaggcccttaccgacatagtcgttggcatcaccttcgagctcaagggtaacaccgggggcgaggaaggcaccaaaggactgaccagcagagcccttgatgttcgcatggatagtatcctgaggaagaccagcttcgccatagcgtcggctgatctgataggaaagagtagcacccaaagcacggtcggtgtttacgatatcacattcaattcggcagggtagacccttctcgagagcgagctccgattcggcaatcagcttgttgtctaagcgagtgtgaaggcggtggtcctgcttgcggacattgtaggtagcgactccagggcgcagtgagtgagcgggggtcaggatgagtgacagatcaattcgttcctgcttggcattacgaatatcgtcccggatcttaagcagctcagcacgaccgaccatctcgttgaccgaacgaacacccagcttggccatgatagcgcgcatctcgttggcgacatagtagaagaagttgataacatgctccggtgtacccttgaatttctgcctcagctcggggtcctgggtcgcaataccaacagggcaggtgttcaggtgacatttctagaaatattgttgttaataggccgttcgtcaggaaatcagggtactggatgtactaactctcatcataatgcatcccaatgcgatcaaaggagttgtggcaaacccatattcttccgctccaagcagacaggcgatggcaaggtcacggcccgtacggatttggccatcggtctgaaccacaacacggccgcgaagatcgttcaaaaccagagtttgatggggctctgcggggacccaattccccatattcttccgctccaagcagacaggcgatggcaaggtcacggcccgtacggatttggccatcggtctgaaccacaacacggccgcgaagatcgttcaaaaccagagtttgatgggtctctgcgagacccaattcccaaggaagaccggcatacttgataccggtccagcgcgaggcaccggtgccaccatcatgaccagagatcaagatgtgatcagccttggccttggccacaccagaggcgacaataccaacaccaacctcagatacgagcttgacggagacacgagctcgggggttagagcacttaagatcgtagataagctgcttcagatcttcaatggagtaaatgtcgtgatgcgggggcggggagataagaccaactcccggtgtggagaaccgagtgcgagcaatggggccaacgaccttatggccgggtaattcaccaccctcaccgggcttggcaccctgggccatcttgatttgcagctcgtcagcgtcggctaggtagttggatgtcacaccgaaacgaccagaagcaatctgcttgatagcggaccgcatcgtgtcgccgttctccattctcttgctacgctcggcatcttcaccaccctcgccagtgttggacttgccacccaagcggttcatggcaatggcaatcgtagagtgggattccatggagatggatccgtaggacatagcaccggtcacgaagcggcggacaatttcggtccaaggctcgacctggtcaattggaataggcgtacgctggtcgaaatcgaagtccaacattccacgtaaagtacagttcttaatctgctcatgtgcggacttggcgtaggcctcgtaagacttgtcgttcttggtgcgaacggcatcctgcacgttggcaatgctggtggggtcgttgatatgggcctctcctccatcacgccagtggtactcgccggattcaggcagaccggggacttcgacaatggggtgcgaagggtacccgcgctcgtggaaggcgaaagcatcctgggcgatcagatcaaatgtgataccacggatacgactagcagtaccagagaagcagcgatcgataacgctgtcgtcgatgccaagggcttcgaaaatctgagcacccttgtaggactggagagtagagatacccatcttactcatgaccttgaggataccaccatcacaggatgacttgtagttctgaataaccttctcatcggagatgtccttgcggatcaagttctcccggttcatcttgagaatacattctagagccaggtaagggttgatggcatcggcaccgtatcctaacagaacacaatggtgatggacctcgcgagcctcggcagtttcaactgccagggcggcaagtgatctccacttatttcggacgagatggtggtgcaccaggccggtagccaacaaagcagagactgcaacacggtcggcggatgtagcacggtcggagagaatgatgagcttgtcgccattctggatagcttcagtggcactgtcacagatggaatcgagcgcttcaatgtaaccagcggtgcccttgcccttctcgaatgtaatatcgatggttcgcacagtccaatcgttgtgggctatgttgacattcttcagagcattgaactcgggaatgctcaagatgggagagggaagacgcagacggtgacattgcgacggatccatttccagcaggtttccctgggggccgacgtaacattcaagggacataaccacagcctctctgatggggtcaatgggagggttggtgacctgagcgaagagctggcggaaatactcgtagagtaggcgaggctgctgggcgatacaagcgaggggtgcatcattacccatagagcccagcgcttccttggagtctgcggccatagggccaagaatcaagctgacttgttcaaaagagaacccgaacgctcggaggcgagggtcgttctgaatggtgttgtcgtccaaggcaaaagaaagatcaacgttggagtcaagtagcacctgattgatagcaggaagcttcagaagtcccttgtccaaccagccggcgaagtcctggcggcgggcaacagtctgcttgagctcggcgtcatcaatgatccgcccggccacggtatcaacgagcagcatctttccaggctgcaagcgacccttttggacgactctctcggggtcaatctcaatagcaccaacctcggaagcacagacgatgcggtcatcgtccatgacgtagaaacggcagggacggagaccgttacggtccagattagcaccgcagtagcgtccatcggagaaagtgaaaagagccgggccatcccaaggttccatctgacaagcggcccactcgtagaaagcagacttggctggatccatggctgggttgtcctgccaggcctcggggatcataatcatcactgcctcgggaagagacaaaacgccgttgatcatgagtagttcaagcacattatcgaacgcagccgagtcagaaccaccatcctcaacgatggggtagagcttgtccagctcgtcaccgaagacctctgaccgaaggacaccctcccgtgcgcgcatccagtttttatttcctcgcagggtgttgatctcaccgttatgggcagcccatcgtaggggttgggcacgatcccaggatgggaaggtgtttgtcgagaaccgagagtgcactagggcaaagtggccctcgtagtctacgttcactaaatcgtgatagtacgtgtacacttgaacgggggagagttgacctttgtagacgatgttccggttgctgagagagcagaggtagaaccagtttccgaggccgatgacatgagtggcacgctttcgtagaacgaacagctgaagctcaaacgttctctcgtcgaatatttcagtgtcggtgatctccggcttgttgccttcgccatatgccgatttcaagaccacaaatggctgcataatgataggctctcgagatagtgcggcaggaccaagaatggttgaatcccgtggtacttcgcgccatccaagaactcgcaagccaagggacgtggccagttcctcaaagtccgcaatggattgcttgagggcctcctcatcgggcttgaagaacaagttgccgacagcatattgtcccaacgggggaagatcgacacccacctcacgggcgaagttcttaatgaagaacttgtgtggaatactggtcatcacaccagcaccgtcaccgtcccgtgcatcagagccaacggctcctcggtgggtcatgttgcacagcagattgcgggctgttcaattgctgtcagcttgatgtcttctcacgttgaacgcaaagagcagaacgctggcactcaccatcgctaacaatcttgtggcttgccttgcccttgatatgactgatttgtcggtcagaattgattttggtccacatgcctccaattgggcccagttgtaggggagatcaactcacgctgcgaagcctacaccacaggcatccttctcatattcagggtcgtacagaccttgccgctctggtagagcattggcccagccaaatccctttttgggttggtactgagaatactcatgaggagcctgttcttcacttatatctttgccatagagctcctccaagttcagacccattcttccgccgggagccgacagagaatggaatggtaactgaaggggactgtttttttgtttttagaaagaccccaccgatttggggattgaaagctggtgatgtcgtcacagggtatcgcagggtgggtgagggaggagtaaacgcgtcaatggtcacccagcttctgcgagagagttgaagatagaagaaggggggaaggtgagaagagaacctgagaaaaaaaaaaggagggggagagggaaaaaaagatgggcgattacggcgggacagtaggtccggggattgcaggccccgatgtacccaaaagggaaaattacaatggtggggagttctaccgtggcaaattgctaggtgaaagcagccaagagaatggcaaggaggttaagtgaaagagatatgagaacagtcaaacctgctacatgctacatgctcgatgctatataatacaacatgccatttagaagctcttcactgtgaacagacattttcgatataagagaagtcgagcaccgacggaaacagcccagagagccagcgtattgataatcattatgattacggagtgcaaatcatcccaagataagcatcgctcgaccaatcagaatgaagattttacgatctagggttagctctttactacgtcaactaactttacgggggtgtcactatatatgaggatatcagatttatacatctgctactccttcttctcgattcctagatccaattcatgtccacttcactttcctctttctcgattctcttcaaagctcacaaaacaaggtctagtgggccgggcggccccataggcccataggcccatagacccataaaaagctcagaggcgttcattggatatatacatacaaagtgtacggagtacggagtacatactcccgtccccgaaatagggcaaatcttcacatgtgagagagagacccgggtgaatgggcgcactcctcagtggggcaaaaatgtagtgcttaatccattcggttttgaaccggtttgcatttagtctgcatatctgcagggaacctggaaaggtactagagaagtaccagtaaaggtacagatctaaataagagatctcaaaaggaaaggataattgcagatgtatcgagtatggagtacagtatacatagtaaattgtttgacatcttaatgaaatgcataaatacctgtaacggtactccatactccgtacacattccgacaacggccaagtccccctgtcccgagtttcccctctctatcactttcttggccttgtacggaggagatgccagatagcccgatttcggggccctgaaccgtttgcgggttgccctctccccctcgttctttaggccactcagactggtacttaccggatatccaaataccagcccatttactgagaatgcctatgattccccattttttacattgtataacgtggacgagacagagtccggagggaaagtcatccagacatgtgaagacctagagataaggtagatgatgataataagaatacataacttttctctgcggatatcttctccccttttcgcctatctacatcgcatattgcccgctactataagtatcccgtacggagtactccgtactgtatctcaatatgaatcgggtgaaacaggatcttgtttatacttcacacacaccaattatagttaccgtattatttcaatcaccataccccggaaccagagagtggagattacatgatccccgccttttctagaccaatcagcgttgagataaaagtcagacacatccaacgtcatgatttcgggggaggctagtgtccatccggctttttccggatatcctcttgtccactttaggttcaccgggttgaccgctggcatcgggtgattccggatatatagatattcaccacctcaccactagatcttgccacttggtgagtcagtttgggattctcatggtgtacaactcgagaactagaactttctactcaggtagttattcggccgaaactgcgcatatatattgtatgtagtgtaagattgatgaaaggccaacatgaactatattttgcccttgggactgaaactaaacatacacttggtggttttgattatatccatccaatatagactattgttaagagcgatgaatattttcagtgttaataggagacagatatactactagaatatgattaacctcaaattgccaaatagtctgtgtatatatatacacggagtatactgcctatatatctgacgatctatatgtatgctgtagtaagttgtatatactccgtagggttgacggatcccccgcatagacgaattgattggcggtggagctccggcttttttttgcgttcgcgctttctccgaccttgcattatatcgtacgcctatattgacatctgcaattgttcttctctatagttatcctcttctttccaacataatccgatttcacatgcgtcccgaagtcctagcaacagtgggcctagcaacagttgcaactccattcgccacaacataaacaaacggctacaaagcactgtatctccaagtcgcaagacatccccgcaaagctctataagcagatacctcaaaataggcagagtattcgcaaatctagccttgaaacagcaattattgcagcgatgctcaccctttcatccatcaccccgcgcgacgtaagtgccaggctctgccgattcaagcttctcaatcagccccggaggaaactaacaacttgatagtcccatgaactttggttcggatcttcccagccatatcgctccacctccgatcaacaggctggcgacaactccgctgccaaccatctcgcccgacgcaatgctggcggcacgtccagcagtaatcgctcattcatgccatcccgctctcctgccaacacaatcgccacactggccgcggaagaacgctcgttacgcgctcgaaaattgaacatcgcgtcgttcgggtactcatggatcaggccggcggggtgcgccaagaccatgctcgggatgaaagaggaggaagcagagcgggaagaggcactacaggctgctgcggcggagttggaagctgcagagggagaaggcatcatggatgatgacacggggttgcagagaggggaaataggggaggaggaaggcatggagcgcgatttggatgacgatatccccaacgcggaggaggaggtctcgggtcttatcgaagaaggcgaagaagggcttgaggaagatgacattggcgacgaaggggaatacatggagcgcgacttggatgatgacatccctgaaggcttccccgatgacgactatgagggctcaggcctgtatgatgatgacgacgaagaggacgatttcgacaaccagcctgatttagatgcggacatacctactgccgacggtgagagtgtgagcgaaggcatgacgcgcgacctcgacgatgatatccctgatgcggcagagcaaggctcggagcaagaaggggaatggcagcacacagacagcgaagaagagctgagtgatgaagaggaaaacgaaaccagtattattcaaaccaggtttcccgagaacttccgcaccagtacgccaaacactcgtggtttgcctccacctccgactctgcgccgcgagcccgagactgaagcccagcgccgtttcctcaatcgctggagcggtggtggcgatgcgtttgattctagcagcatgctttacagcgacgaagagctacgcgcatccataaccagtcagggtagtcgacgaagcgggtttgcgagaaggttcccgcggcacatcggtgggcctagggatagtctgaactaaagacatccattataatggtatacttgttatgttcctctgcggcgttttgtgtcagcgtaaaaggatagatcttggggggtctatctcggagttttggtggcaacttatgatacctccttgtaacataatatattatatgagcaagttcaatgaacgtggcttcaaacgcattgtgaatatccacagtcctggaaagtaaggctcaacacgtagaatggtttgttatgttaaggcagtccctgtatattgttttatatgcattatgtacgggttacttgaaacatcttccaatatcaaagccatgacctctcctgaattatctccagagatgaaaaccagacaggtcccaacttgttgacttgaaagcggtatgtaagccaatggcagggttttgcattattgcatatacatagctcaaagaatccatagtcccaaaacacctcatagcgccaaagccaaggtttccatgctgaagaaattgaaaagtcatgtgcgtgactcgattaagatcaagtaaagagcaagtcgctgggttttccgtgaagtaagacgagagattaaagatgataaagacaagaaagtcgggcgtgatcgacatggtatagagcgcgagtgcagtcttagaaagacagcaagggtatacgttcagaatatccacacatagaagaacaggaggaagacagcgaaaaagaagccgagccagactcgccagccgatgccggtgctctcggccatgcgaagcatacggttcatattcccccggagtcggactcgcgtgttatcaaatgaatcgttgaggtcggtgatatgtgtggtgtctcggatttcatcgccaattgcaagtgtgatctagatggttttcttgtcagcggtttgttatttcaaactactaactgccctagttgggtctggaagtatgggtgcgaggcttcttacatccttcaacattttgaccttggcactaataccctcaacttcggcgtcattttgtgactcgagagatgagagaactgcatcggagtaatgtcccctatatcaaagccttggttaacaactatacatgaaagaacgacgggcgatcttaaaagatcatgagccattcaacgcactttttgtcgggcgatgcgctttgatatccacctccagctgcaccgctactcgcataaccattaagtgctggactggggtagcctccgtacccgtatccacctggttgttgggcaggcgatctgctagcttggcgtgagtcgccaccgtattgatcaaaaagagacgaagaggcgcggggatcacgttgacgcggaaagctattcagattaatgctgcattagccgactgaaggacacctcataacgaacggagggagaaacgtaccgtgaagccatgacggtcgtggagtgtagctagagttcgcgatagagcaagaggaggaacatggattgcagatcgataagctcttcaacggcaatcgagcatctcgcaagggtcaaacgcaagtctatcactgttcgagtcctcgatgtttgatgcttgcggagataaaaacatcaaagtggccatagcgttatcattcgctgaacagcacgtgatagcccaagtactggaaaccgacacgcgggatacacagcagatgtggttcgcatgggcatctgctattgtttatctggtcatttaggattgattatggaatgaaacgggcaaagcattgctcattctaagctatgccttggagatatccatttggtctacaagttacatcataggttaaaaatgggccaacccgtagtcaatggattaagtgtatattaacggggttggaaaattttttttccgaagagatattcattgattcattgtcatcacagaatcgcgagacatgttttggacacacgggaaaaaaacatcgtggaccgacccgtggcgcctatcgttcaaagcaattccatgccacccggaagttttgtattcatcgagcttagtcgcgcatctgatcatcatcgttggtctgggtgtcctcgcggacctcgtattcctcatcgtcatcctcgtcgtcctccatctcgtcggtggagatcttggagtagtcaatgaccttgccgcgtgtgcgtcggccaccctggatgatgttgctctggtcgatggggtcgttgagattgtcttgtgtgtcatcctcttcatctacagtataggaacagaaagggtcagtatggaggcaattggtggccgttcaggcgcatgtggtcattcagacatgggttgcttgggtgacagtggggtacacataccattgtcggcctggtcacacgcaaggaagtcagcataaaagaagcaattgcgcgtagaaattggagactcacaatctcgttctcgctctcagactcgctctcctcgtccatgctcatatcttgggtggggtcagccttgcccttgcccttggcaaaggcctcgtcgttggagttggaaatagtcgcctggtcagacataatgaggtttattcagggggtggatggagaattgtaggaaggatggttggtggaaagggacaaggggaatttaaaagacggtctgcaaagtaaggtctttccccctcgaaccaaaacaagctgcaagggcgctctcgccgtctgattggcggtcgcgggtgatcaaaccccgtgacaaatcctgccctgaggcatcaagtacaagtaccaatagaaagaggaactgaaagagcaaagtaagtaaactattggaaatacctacataacaaaatagacatatctaacttgttgatatgggcaagcgatagtcccaggctatcgacaatattacatactagaacgcttctttgtctgcatttgtgaaccatgaagaggcaaatttcatattagaacttatgatatcagctattcttctgtcaattacgaaagtaaatcagctgtccagagcaaagcatctttccacagacgttgcattattgccccaccattttggcatcgagacttgcttccccgctccgaaaaagaagaagacgagcaacatgttggggttgaatccagcatcaaacgcagcagcaatcaggtagttgtatcgcttccagacctcgaaatggcgacggtaagcccaatacattacaatatatccaccaataatggcagatgtgtaaccagtactaatgttaccgtagaacatcgccaatcccccaaaaaagatactgacgttccacaagtcaattcgaagccgggggaagaagcggtggaaacagaagagaataggaggaatcaccgcccctacaaggaatgaccagggaagcacggtcatttccgtctcagcgaaaagcctctttggaccaagtacagcgtactgaactcccattgtgttggaggtccgcagggactgtcctgtccactgattcagtggatctgtttttttgccagtcagataatctcctttggtgtccatgatccaacgcatgacggcatagttgattggaacacccatacaagtgccgaaaatttgggagaagaaaaccgcgcggggtggaatgtgcatgtagtggccaatcttttggtcctggagcatatactgtgcccgataccaggcgtcacctgcaatagctccatagaccgaaggaccacaggggtgttggtgggcctcgccggcttttgtatggaccatgtagccatacatgagttcattgaatgagccggtctcaagctggtagttggaaatggcgtaaagccaagcaaaggggatgaccagaatggcagcactcgaaagtgccacaaacaacgtccagattgggatgaatagatgaccgagtgcgaagaatataatcagaatcacaaaagctaccgaaaatagaataccataccaccaccatggaatctctttgtattgtctctggataacattgagacgatcgtgatactggtgatgaatgctgtcgttcttcgtggatttctctgcattgcgggatgaccagattcttcggatattcccggaaatctgtgcgtatccaaaggtcaagatccaagtgaccgctgctggaagtttcgcgtagtcgaagaatgtcgcccacacattttgcaagcccatatacatcggcccatactcctcgtaagcggtcacgttcagatgatagtctggggtgagtacgtccagggttgggtattctgtaccgttgcttaggaaaaggttgtttgacatgagtccatgcttgaaggaacctagactcccccacttcgctgcaggaagtaggacccaacaattgaaagcaaatgccaagaacaagatgacctgtgtccagtatggggtcgtcatgattgaggatccattccaattcacattggaccaatccaacgagagattgaggaagcccatgccaccaatgcctgagccgataaagttggccaccggattgcgaggtgccacccagcagaggaaggccagagatgaggtgaatgggaagacgtactctggaaggaattgccacatggtcatccccagaagcgcgaagaagaagaccttcatctggcgccgtgcgagagcagaggagttgtctgttttgcgaaaagtttcgaacaatgtggtttgcatcaaagcttggggccagatgtattccgggtcaggcaaaaggagttgtcgggcaagcgcagcaaaggagtaaccaatccacacaattgaaagcatgaagaagattgcaaccgccggattgattcgtgtaccgtaccaaagctctgcgagcacgatgggggcatatcctagattgtacgtagccccagacgctgcagtcaatgtgaccaagacatgctccttgatgctccatggggccggattcaggctaaaagaaaagcgagtaccaggtagaccgatcctccagtcaggaaggactctggccataaagtgcccggcatagtgacaggcgatttgaacaaagaagatggagtatggtgccgtggtagtgcggaagtgactcatctgcgacagaaaggcaccaggaacaacaaagatgatggcgagcacaaagtaacggaaggtaattgtcggtaagctggggtcgtcggtcaaattgatcagatgtctcacgggcaagggcaatgcagcaatctcgggattatcgtgtatttcttgttcaatggcggctgattctcccttgaaatggaggttctcttcatctaccgcagtctctgccacctttgggtctttagagaactcggagccttctgaacccataatctcttgttctatttcgacctcggtgggggtttcctcgagtctcttacgcttcagtgcagcgaacatgtttaagaagatttccgatagcccatggaatatattttgcatgaagttatttaaataaaatagctcatgttgtgcgactggagtaaatattcgcaattcccatagagaaatgccccattggacgagtccaggctaatgccatcacatcgttacagctacaggggtgcggacaaatgcttagcgcggatggcgcaagccaaaagctttttttttttttaggcttaaaaagaataagaaataagagggaaaatagggaaaatagggctaaccagtctcttgtttagattttgtagatgatactccgtatatctagaatatatatatatacttggcaggggaattatagggttgttccaaggttcgttactggtatgaaatgaagtatataattgctacgcttcgctccgcaataagaacaacatagattggatgaaatagtttttatacatagattctgggctatattatttgaatgataatatattaggttctgtgagtgagatcaaaagaaataactagacaacatacaacacagtcttcgagttagttaggaagttcacctcgacatgttgagatcgacattttagagaattcaggttctgcctcaggctgcaaggggcgtacagattacgtcagccccacttgtgcactgaccaccggttggtcatatgaccgccgagtcgtacgttctgatttctgcccggattccccgcccggaccggagaaaccccggccgaagtcagctggaaaactctggtcgaacggggtgggggaagtggtcgggtcatgaattcactatgacgcatacataattgacagtaccagtaccaataataccggcacgagatggccaccacacagagaataccaggcggtccctatggcgacgtgtatgcaggctgtatcataccacaataccacactctgacaccttggaagtcagcccaccattacatcatacagccccgccataaagaaagctgagaacggcaaagaaaacccatatgaatcagagaggaaaaaaaaaaaaaaggaattgacatcgtcgacgctaaagttagacataatcaagtaatgtagacacctcaagactccactgggctcgtctggaacctactagagtcttaatgaaggacgtaatgaggtggttgttgggccatcgaagctcgtggaatctcatggattcccgtggaaggctccctctagaagcttctggggcaatacaccgctcactatatagcagcttttcgcagccttcaaccctcttctcttctttcctctctcactatcaaatacccttctactctctgtacactatcctcgtcagtgaccagtctctttctatcctttttttctttttaacgattacacacattcaccatggctcccgccgtcggtattgatctgggaaccacctactcctgtgtgggtgtcttccgtgatgaccgcattgaaatcatcgccaacgaccagggtaaccgcaccaccccctcgttcgtcggtttcaccgacaccgagcgtctcatcggtgatgccgccaagaaccaagtcgctatgaacccccacaacactgtcttcgatgccaagcgtctcattggtcgtcgcttccaggacgctgaggtccaggccgatatgaagcactggcctttcaaggtcatcgagaaggctaccaagcccgtcatcgaggttgagttcaagggtgaggtcaagcagttcactcctgaggagatctccgccatgatcctcgtcaagatgcgcgagaccgccgaggcttacctcggtggcaccgtcaataacgctgtcattactgtccctgcctacttcaacgactctcagcgtcaggctaccaaggacgccggtctcattgccggtctcaacgtcctccgtatcatcaacgagcccactgccgctgccattgcctacggtcttgacaagaaggtcgagggtgagcgcaacgttctgatcttcgatcttggtggtggtactttcgatgtttctctcctgaccattgaggagggtatcttcgaggttaaggccaccgccggtgacacccacttgggtggtgaggacttcgacaaccgtctggtcaaccacttcgtcaacgagttcaagcgcaagcacaagaaggatcttaccaccaacgcccgtgctctccgtcgtctccgcaccgcttgcgagcgtgccaagcgtaccctctcttccgctgcccagacctctatcgagatcgactctctcttcgagggtgtcgacttctacacctctatcacccgtgcccgtttcgaggagctctgccaggacctcttccgtggtaccatggagcccgttgagcgcgtcctccgtgacgccaagattgacaagtcctccgttcacgagattgtccttgtcggtggttccacccgtatccccaagatccagaagctcgtctccgacttcttcaacaaggatgccaacaagtccatcaaccccgatgaggccgttgcctacggtgccgccgtccaggccgctatcctgtccggtgaccagtcttccaagtctaccaacgagatcctgcttctcgatgttgcccctctttccctcggtattgagaccgccggtggtgtcatgactcctttgattaagcgcaacaccactattcccaccaagaagtccgagaccttctccacctactctgataaccagcccggtgtcctgatccaggtcttcgagggtgagcgtgcccgcaccaaggacaacaacctcctcggaaagttcgaacttactggcattccccctgccccccgtggtgttccccaggttgaggtcaccttcgatgttgatgccaacggtatcatgaacgtctccgctctcgagaagggtaccggaaagtccaacaagattaccatcaccaacgataagggtcgtctctccaaagaagagatcgagcgcatgctttccgaggctgagaagtacaaggaggaggatgagcttgagtctgcccgtatccaggctaagaacggccttgagtcctacgcctactccctcaagaacaccctttccgagggcaagctccagatcaacgacgatgacaagaagaaggtcgaggacaagatcaacgaggtcatcggctggctcgacagcaaccagaccgccgagaaggaggaatacgagtcccagcagaaggaacttgagagcgttgccaaccccatcatctccgctgcctacggtggccaggctccccctggcgctggtgcccccgagggtgctcgctccgctgacgaggtcgaggagaagcccgaggagcttgactaaatgtttcgctctgaatgacttgcttgtttgccatttggcactcgcttccttttcacgtcttgttttacgaacttatgggttatcaaggtttccttttgcgcatgattgcatagatacaaggttatctctttctagggaaaaaaatcctagtgaatcaattttcttttaataaaaacacaagtctcttgtacattgtagatcatagtattaactaactggtcttgttggacttaggccccattcggacctacctccacacttgcattgaagagtgaaggtatacaggattacatcctcccggaacctcgcgcaagtgatgagagtgaccaatccatacacgacggccagtatatatacatatagaaatacaagattcaaccatcaatattaattctctttgcgaggatctcccaaaccaaaactccaaaccgatgatgtatcaaaatcccgtttaaacatcctggaagtctccgttccaccaccgctgtaaccgatgcccgctcgtttgtacgatgcttccgtaggtgatttctgaagcgcgctcggggtactgctcgcgctggtcacggcggatgcgggtgagggcagcagagacacccatagccagggcgaagaggggatccgcgatcctattcatatagcgttagaatgatatgtctctcttgtcggagacagttggactgtgcggaagtatgtgtacctggagatgaggtagacaggcatgatctgctgagatttgggaaataaggtggtggtttcggtgattcgaggtgttatgtcgtacatctaagagctagaagagaataatcacgtgatgcggacactgcttgatcggttcatggccctccgtcttccacagcaacacacatctccgccatgcatttctcgctctcctctcttctcctgctagggattagcagtctggtgtctgccagctctttgacaattaccattcccgtctctagttccctcccaaacccgcatgtcctccccgcaaccagccatgccactctcaccactctcccctctagtgggaaagaccacatcctgtccgcatcgctgactcgctcggcgacgttcgtgttccatgatcttccatcctccaatccggatgctcagcccgagtcctacttgctcgatatctgctccgctggtggctacgtcttcgccccctaccgcgtcgatgttgcggctgatggatccattctcggaatctgggagacttttcgcgggaacccgtgggataaccgtggtgcggagaaatatgtagtgggtgttactggaaagaagcaagttgacgtggttgtcgaggccaaggtccttggacggaaggtcttctatgagcagcgtgctcaatgtgagcttgcctcctcttccccgcagatacaacctgtaatatttgtccatagctgtgctaactttgtatcgaatcgcagtctctcccttgagtcttgtcaagaacccaatggttttgcttgcagttgtcgcgctgggtctcatgtttgtcatgcccaagctcatggataacagtatgtctattccccattgaccctaatccaatgttgggtgcctaactttgttgtccagtggatcctgagatgcgcgccgaatttgagcagcactctcgctcctcgcccatcaccggtgccactaccagtgccatggctggtggcgggtttgatctggccagttggatggcgggcactggtgcacctaaccccacggccagcgatgtgactcaggctggttcaactggtagagatacgagtggtcctgcccggaggcgtggatagaagatcattgctttattatattgaccgttcttgacatggtatcttgtcattgtcacgtggctaatagtatgatacaaagttcactgaaggtgctcgtggctcataaaaatagagccgaataccgataaatgactagagcgatttaggcgaaacaaaagcaatcctcccaaatccctcccgatgtcaaagcgcctagagtccctcgagatgtacagaggcctgtcccttatgccggagtccatcctagtaacgaaagaagaaaaaagcagagcaatcaaagaaatcgaaacgcagccgagcttagaagtcgtctcctccgaagtcatcaccaccaccataatcatcaccgccaccgccgccgtaatcatcgttatcatgatgatcctccagagcatcggcgatcagcataccgccaagcaaaccaccaccaacacccagagcagcagcaccggcagttcccatacctcctccaccttgcctgcgaggcggttgctgctggtcatatccaccccgctgtgggtatcctccatatccacccccgtatcccggtccgggtccatatgcaggttggccatgctgcggaggatagccaccgccaccgtagtaggcaccagggggaggaccttgctgagcgtacgaggcgtattgttgctgcggccgaggtggcctactgcttgagctcgagctcttgcccatcagcttgctcaaaaacccacccttgctgcgcttctgttcctgctcaggcatcgggctatgcgacgacgctggaactgccgcatatccccctggaccggtggactgcggtcgcgaggtatcgttgtagtagtctgatgaggcgccacgatctcctaatccggccccggttcctcgtgtgtcggcccgggcgtcttcctcggcttggagcttggcggcaagccgtgcgtcttcgtcaatcgtgttagggctagtgttgcctgggccagtatttgttgaagggttataggggttgtttgatcccatgtgtttcttctggtcccccgcactggctattgctgctggatcgcctggcccggcgttgctgtatgatggtgggagagaattggcttcggggcggtcccattgcgatttgcccgtggcaaggtctacatagaacctgtgtggttgtgagtactttgctctttattaagatgagtagatacataccaagcgtggtatcgatcgtcatactgcgctgtccatccctcaggtaccgagggcgggggaggcccggaaggcggggcaaacgacatgatgacaggtattattgacttgaataggttgcaaggctgaaagcttcaatggtggtaatgatcaaaatgtcaagtttgaaaaggaggatgagagatgagtgagagagtgagagagtaagagaaagagtgaggagggagttcttgattcttccatggatatatacttagcggggagtaagcgggtaattgtggccttaggcatatagactgcgcctcccctggtggcggtgccccaatgtcatcattcaggccatgaccagtaagttaatcatggctttgggagttagttagggcagggaacatttagatatacatgcactgatgcagcctctgtccttgacaacgtactataccaatctgatctatttggcccaatataattcccccttcttgggattgggcgtcatgcaggatactataaatcgtatcaccttttctctgtgtacaaggttacaatgtgcaaaacaaaggaaatattcgatcttcggagtagtatgcatatacgttgagtatacatttggattgttgacatacctaaccatctactttattacatagtccgatctatagaagatgagcagagtggtattgtatgtatgaaaatggagaccaactatgcctaattgagtagttcacaggaacctgtatatatccaagtggaaggttctcttctgactctgctccttcctcgatctcttgttccatgccatcggtcctctccctcctcctcccacctcacttcttcttctatcctccagtcccaatctcgtctcttctcaccttccactacttcctcatctccaaaagttcccttatgtttaccatcatctcgcaagaatctgctcggaatccttttcgttgcatgtaaactcacttggtttccaacgagcctgtttgtcccaaccttcacgcagcgacttcattactttttttttttcgcctttcttctttgctgtttctatctctggttttgtttctgttttactttaatctcttccagttgacaacatgtctaccctaagcggaccttcaacacttggtcgaatggggaatgggggatgttttacctccaatgataccattgatgtgcgaaatctttcttttggacacgattcctcggtatgcttctcgggagacagctttgaatcgattctccagcatgctaatcacattggtcgcgacagaaccctcagaactcgattgctcattacggttcttccgatacggctgaaacatcccggcatggaatgttgcagtccttgtctggtgaaggggctgagcactcgtcgagcaaggtatgtgtttcctctggtgttgactcatgcgtttgggtgtctgtgatctcacaatcctagaagcagaagctagatcatatcaaagttgaacctttgaacggacaaacatcggatcttgacagaatactggccaagatttcccccaaaacacaacccctttcacattctgaaaccgatcgctcttctgtttcgtcccagatcactccagttacaacggtgtcaactttaaccctcaacaaagcccccaatccttgcccccaggaagacagaacggtggagctccttcgtcttaggcaggaactccttgctgcaaattccaagattgctctgcaggagcaggagcttgcccaaacccgtgtgataaaacataccttggatcaagcccttggtccgtcatcagaggctgatttcggcagccgcgaaattacagagcagaccattagtcacctgcagaatgcatttaatgcatcgagctctgcattctctcactttcaagatgcatggagtgcccaagacgattcgcagtctgatgtctcggatccattgtctacaggagcttacaatagatctcgcgcactctgggcccagaatgaggctgccacagacagagaatatggagatagcctttcaggcaccagcagctcgacaagccaggagccaaatcggttctggggagtctccaatgtgtatcctccgtttcccggcccaccatctctacaatcgcaaagaccacactcggggtcctcagctagtccatgtggattctactcacgtcccattggtgaacagatgttgtgtccttcaggacccataactggggctcgtcgctgtatcactcaaaacagtaggggtggatctctattcccaattcagtctactccttggggtgaatttgcttctgggtcctccagtgagcataccgtcaagtcacctgcttcgccgaagagaccccctagcgcctttcagcagatcgggctttactctgtgccctcttacccccctcgaccgattggcagccccctttcacctactgctaccgagtttacgggcaccaacacgaatgaaaccacatggaccaactcggtaagagataaccatgtgcatcgtgtttacattcattctaactcttgtcagatgagcggcaattccatccagacgtacgtgtccccactcgagccactcaactatcgacgcctgctcgacaagaatgtgtcgtgtgattggaagtacattgtagacaagatcatctgtaacaatgaccaacaagcttcaattttcttacagcaaaagctcaaggtcggcacaaccgagcaaaaatatgacattatcgagtcaattgtgcaccaagcctacccactcatggttaaccgctttggaaacttcctcatacaacgctgctttgaacatggaactccggagcaagtcgtcgctatcgcgaatgcaatcagaggaaatacgctgaacctcagcatggatgcatttggctgccatgtcgtccaaaaggcgtttgactgtgtttcagaagagcataaagctatcatggtacatgaacttcttcgcagaattcctgagacggtggtccatcgatatgcgtgccacgtttggcagaaactcttcgagctccggtggagtggtgagcctccgcaggtgatggccaaagtaaatgacgcactacgtggaatgtggcacgaggttgctcttggagagacaggaagtctggtcgtccaaaatatctttgagaactgtgtggaggaggaaaaggtgagactccccgtcagataccatacgcatcaagccccttgttttcgctgtcctacttctctgttggtcctttatattgattatgccaatgctaatctattgcagcgaccggcaatcgaagaagtactggcgaagatcgatgtactcgctcatggtcaattcgggaattggtgcatccaacacatctgcgagcacggtgctccccacgacaagagccgtgctgttgagcatgttcttcgttggtctgtggattacagcatggatcagttcgcgtctaagattatggaaaaatgcctcaagattggcggcacagagtttatggatcattatctctctcgtgtctgcactggccgatctgaccgacctcgcatgccattgatcgacagtaagttgcttaggctttaacgccgtgaaaacgtactaatttttttttagtagcgggtgaccagtatggtaactatctcatccaatggattttgatgaacgccgcacctcatcaacgagagctcgtggcgagccacattcggtaacactccctgacagtctattctactttgagtggtctgaagtctaacctgatttaactaggaaacacatggtctcccttcgtggctctaaatttggctctcgtgtggcaatgctttgctgcaacccgtctcatgctacacgccctggtcctggggctggaatgcaaattggccgtttcaacaatttcgacgcagacaaatttacgaccacgagccaatccggtggtcgttttggccggggacatcaatggggaccccattatgcgccacttcgttgagtctgcctcttaatacttcatgttccctttgatgggcgtgcaaaaaaaaaaaaaaagagcaaaaaaaaaaaaaaaaagagcaaaaaaacaacaacaaccagaatcaacaacgaagaagaaaaagcaccagttaagcatttcatctcctctgctttcaagcagacagtctgtctttgccggtttgcctgactgtgtcttatcaatatctgtcgacccagttcccaattatccaatcatttctgtgtctcaatattgtgagttatcattgcttgccgatttattcatttggcttgctatccccagtggctatcatttcattcagtcttatggattgaagcttggggcgtgtcacgttaaatttctcttcaagaaaaccacattgttattacccaaattctaatcgaatatttaatccatcatgaaccttatgtggatagaatatcatttttagggagcagcacttggagtgtcattggaagcagtcatcacttcgtccttttcccatggtttccgtcgccgtggtttctcactggaaatatcgtggccactaagcactgtgtctgggatgtcctggatcccaggtattggttgtcccgtagtgatgagttccacaatgtgtgcaaatgacgatggataagcaggttcagaacgtgttgagctctcagccccagatgtgcttgggtcggatgccttggagatttgtaagtctgtgttgcccagcccttggggctccgttgtccgcgatgccaaccacgacttgaaggcagaaaagtcaatagccggagtgaggttttcttttctatgctaatattagtacccaacccattttgcgtatatatcctcgacctaccgtgagaaaaagaaacacttcgcttttaggacaaggtcgtcatcccggttcatctccacctcggtggcgggggtgtcggggtgaccaagtattattgagaggccatttgcaaactcgggatccgatatgaaggggtaagaatgtaatctttcaaagatctgagcttgcgaggcctgtgccattgttcgatgaagaatacacacagatatctgagatgcggaggatgcggaggatgcgtggggcaatcttagttgtaagctaactactccgtagccgaggctcgtctgctctagtgcgctcgccaattgtttactctgcaccatttgaccgcatagagccttttctactcacctcgagaaatggtgaaagcgacatggcacttgcgagagaaaaagattggtatatacaaacgcctcacccattccccatgctaacttttggcccttgaacagaacagaaaaatccagggatatcttgcgacgccaaactatgcaatattgagataattccacaccctagaccatgatatccattccacctgacgttgggttgggtgcttcagagtgcagggatgtacttttactttgacaaccggggcagttatgcacgacctcatgggcaaagagatcgcagtcgatacaaaagtggttatgacatgcagtacactcgtagcgactgctcacactcattcccttggtctggttctccgtaatttgccagtgatcctccaaaggcacggacggaaaagaaagaccacaggcaaagcaagccgagcttcgcgaggctcgacgccacggcacctcgacccagttgatcaaggggaatagatgatgatacgatcgtgccaaatgggttgaaaggatcaaagtgagcccacaagatgggcattcggcaggaagactacacactttgctgttgcatcgtgagcaaagatagcctcctcgtgagggctttgaatggcatgcacagagcgagggataggactccactgtacgggaagggaaccccatcatcagcaatgagcctgcagattctttctgtgagtaggcagctgggggtgtagtcacgtccatcatcagctcccggaagtgctgctcattcagtgctactccatatgctgtttcatcaccaccattggtttttgtacaaagttcccggcaaattgcaacctgggctgcgagccccaccatattaacccgaattttgtcgctaatcagggtatttatcgtttggtgaatgtctccaggatcggaggaaaggagggaaccatatataaatagcacttctcgagtgccatggctaggtgtatggctaaattcaccaattagtttcgtttaaatcccccaggtttcatgtagccagtgtaaacacatacaaaagagcaccacgtgccatctccaatccattctgaagactaggcaaacctttcggatcttgtgttttgagggcttgaatggcggtgaggtgttctgttggatttccactcatgtcactgactcggagcgcgagaccatctctcaggccgaggacaccaagctgggagatgggattttgttcaaaaaattccctcacaaattcctgggcatatcggagagtcaacaagtatctcgtgggtcgcaagtccttctcagacatggattgtgaaagatccagaattaggatgagatgtcgaatgataccgcgctgtagtggtgtcgtatctttcaagagcctggatgaccgatacacttcagcaagaatatggggacacggcaaagggaagaaactgacctttttcgtttcccggcctccagaagcccttcaacggtcgagttgatggtaccatctgcaccctccaccagtgtctcccaggttctggatagctcccattctgcgcctccgcgctgctttcttttggctcgcggattatcgccccgagtcacctgtaaatcatcttcgtcttcggttacctcccccacatattcttcgtcggagtcggccatgttcgtaggtaagagtggagagagaaagagagaggatccaagcggaagaccgagaatggtccaagcttccgacggagctccgttggagaatatcctccctatctcctctttcaccgagtcgcaagtcgcaatctcttccaaaccaagcttttttggaatagctccgacgatagccgtagacggttaagctagaaaccccccgatgtggggaagaagatccattcgtgctggcgtagcagttcaagtcctccgtccagtcactgtccgccctacccctcctcttctttctcgcacactacacaaactttctctttcacattctcctcgactccggcctcgactgcctacacccgcggctatattagatctgaatttccctcccattaggcattgttccgccgaagtccgcatgatggcttctcaagagcgagagacacttcctgacgtgtgagtgatgccccccgcttgggctattatgtttctttttttgctgccttttcgtttgccacattcaagtcctccctttctttctggttcgcagcattggaaactgacatgacaatagagctaagcctatcaactaccatgtctcccttttcgacttgcagttcggtggttcatgggaatacaagggcgcattgaagatcgatcttaaagtcacccatgctaccagcgagattgtgctgaactcgaaggagatcgaagtacaaaatgctgagatattgggaaaagatggtacgtgtgggagaatataattagggtgatatagagaggacaaaacttatttcggtcttcttgtcatagggagccaattggccaaagtatccgggatcacctacgacaagcaatcagagcgagtttccctcgctttctcgcaagagattgcgccggcagacgttgtcctttccatcaactttacgggcactatgaacaacgccatggccggtttctaccgctcgaagtataagccggtgggggagccatctaccgacactcctaaggaggatgacttctactacatgctaagcactcaatttgagtcctgcgatgcacgaagggctttcccttgtttcgatgagccaaacttgaaatccaccttcgatttcgagatcgaagttcccaagggacagactgcactgagcaacatgccggttcaatccgaaagagacggaaacaagcctggtttgaagtttgtcacgttcgagaagacgccggttatgagcacctatcttctggcctgggcagttggtgacttcgaatacgtcgaggctatgaccgagcgcaaataccaaggcaagagtattcccgttcgagtctataccacgcggggccttcaggaccaggctcgctttgcactggaatgtgctcaccgcacgattgactatttctcggaagtctttgaaattgaataccccctccccaaagctgatctcctggcagttcacgaatttgtgagtaaccatttattccctatgtgttccaagcttttcatttgagctaaaatgcgagtctctaggccatgggtgccatggagaactggggtcttgtgacctatcgaacgaccgctgttctcttcgatgaagggacgtccgacaaccgctacaagaaccgcattgcttacgttgtagctcacggtcagtccccacatccattcgatctctgcatatgttgatgtcaagatggattcgttatctgactcattttatagagctggctcaccagtggtttggcaaccttgtcaccatggactggtggaatgagttgtggctgaatgagggattcgcaacctgggtcggttggcttgccgttgatcatttctatcctggtgagctttggtcgcttctggcagatgagcctctgacgcagtatctaatgtgcaagcagagtggaatgtctggtctcagtttgtcgtacggaattcccgaggtaatatccattatgctacgactgatattgacgttcttccaggctgaaggtgtgcaacaagcatttcatctcgactcgctccgcgcttcccaccctatcgaagttcccgttaggaacgccctcgaagtcgaccaaattttcgaccatatcagctacctgaagggaagctctgtcattcgcatgcttagtgttcatctcggcagggagactttcttgcgtggagttgcggactatctcaaatctcatgcatatggtagggcgtcaaagaagaagatttcaaggaacatctgctgagtggttataggaaatgcaaccacaaatgacctgtggtccgccctgagcaaagcctccggtcaggacgtgcattctttcatggtaagtaccccttagctctttgtttggctgtctgttggtcagcttgagatctgactgagctgccctagaatccctggattcgcaaaatcggattcccggttgtcaccgtgacagagcagcccggccagatcaccgttagccagaatcgattcttgtctaccggcgatgcgaagccagaggaggatgagacgaaatggtggattcctctcggcatcaaatccggagcagaactagctactgttgacacccgtgctctaaactcgaaatccgacaccatcagcggacttggggagggcactttttacaagatcaacaaggacttgtctgggttctaccgaacgaactacccccccgtgcatctggcaaagctgggccagtcgcttgatctgctgagcaccgaggacaagatcggtttgctgggtgatgcagctgcccttgcagtctctggcgagggcactacgcccgctttgttgactcttctggaaggattcaaggaggaacaaaattatctgtgagaaacttcgccttatggtcctttggtatcatttctaatctctcatcttgcagtgtttggtcccaaatctctgcatctctggggaacctccggtcggttttctcacaaaacgagaaagtggccaacggattgaagcaatttacccttcaactggcttccccagccgcagaacggattggctgggagttcaaacctgatgaggactatctcattgtccagcttcggaagctacttattgcaatggcctgtaatgcgggtcatgaagggtgagctatttttcatcgtgtccggatgttgttgaacgctctctaatacagtctcattatcttatagatttgtttcagaggccaagcgccgttttgatctctgggcgaccaaaaaagacatcagtgccatccatactaatctacggtcagtgattttcagcgtgaatgtgtccgtgggcggccgcaaggaatacgatgccgttaaggaagagtatatccagacagactctgtggatggcaaagagatttgcctgtccgcactgggacgcacaaaagatgctgctctggtgaaggactacttggacttcgtgttttcagataaggtggctgtccaagacatccacagcggtgctgtatctctggccgccaactcgaaggttcggcatttgctatggcagtacatcaaggacaactggactgttgtcgaaacacgattgtcatataacaatgttgtgtttgagcgctttgtccgtatgggtctatcaaagtttgccgaccaccagaccaatgatgacattgcggccttcttcaaggacaaggaaacgggggcctatgagcgtgcgctcgtgattgtctcggataacattcgaaccaatgcatcctataaggagcgtgaggaggcgttggttcttgaatggctgctggcacatggttacgcataaatgtgcatctacaaacatggtggctttatgattttcaacaataaatgtgttcaactggactctttctttgattttgatacagtgtcaaaggggattttagattcttcaggtcattggtccacgaggctgggtttatgcacgggatatcagttgagcaggtgatctccaggaaatggaaatcaaaataaaaaaactatccttgtgatagatatatcggtagaaggagaactaaaatcaagaagggacctctatagaagatatagaaaacaccgaaagaatagaaaatccgagaagtggtcgtgacgtgaaacaaagctgcgcatcaggtgcatctggctccctgcacctcctatcatttcaggcgactgttccatcattgtcccctcccccgacttcttaggaacttcgactccatcaactctttttttttccttcccttatattcctctggacttgtgtgtgctctatctctgcttttattccaccttcttatccacctcccagatctcatcatgaatcccgagtggtaagccttccccatctcatccatcccccaagttcccttctaactatgcgccctactttggtcgactatacaagtctgcctctgtgttgaatttgactgatgtgattttgatttctagagtattgttccgtcgttgatttgaccgtcacacgacccaaatcccctaacttgccgatctccgttgcctaatcatcgagatagatacgattaccttttcaagctgctcctcatcggtgattccggtgttggaaagtcttgcttgctgcttcgttttgccgatgatacctacaccgaaagctacatctcgacaatcggcgttgacttcgtacgtctcggaagctgcagggtatttggctgcaagagaatagtggtgctgacaggggattatagaaaatccgcacaatcgaactcgacggcaaaaccgtgaagcttcagatcgtacggctagattgaacaccgaacatttgaagcaaagctaataatgcatacagtgggataccgccggccaggagcgattccgtaccatcacatcttcttactaccggggcgctcatggtatttgcgtggtttacgatgtcaccgacatggattccttcaacaacgtgaagcagtggctccaggagattgaccggtacgctaccgagggtgttaacaagctgctcgttggaaacaagagcgatatggaggacaagaaggtcgtggaatacaccgttgccaaggtatgtttaaagacagacttcaaggccgttgggatagactagtaacatgtcttgattgcacttttacaggagttcgccgatagcctcggaattcctttcctcgaaacctcggccaagaacgcgtcgaatgttgagcaggcattcttgacaatggcacggcagatcaaggaacgcatgggaacggccactgtcaacaacaagccgactgtgcaggttggtcagggacagggtgtccagtctggatcagcaggtggctgctgctaaacggcacgatgttctctttgtgcggtgcggtgcttcaaattggcgcaatgttacatcatgaattgaggggtctcaagcggcgtggtatctaatcgacagaagtcaggcttgtcaggcctttggaaactcggcatgttcctgatgtgcaaggagacgattctccacagagctggcagtcgttatgatgatgccgctgggggttcttctctgccttgggttcgctttagactgcctgcgttctatcctcgttactgcgtttgctcgtgcgattaccgccggtttctgcgttctcatgatttcctggccacgtctctgctctattaccttggcccgtcattctctctgtgtctccccccttccccctttcctcttcacctttctattttctattttcgctttttttttctgtaggttggatttcccacttgtgaatggactaatagcgagaaccttgcgacttctcgaggcataatgcctcacatggggctactttttctattattttccggtaaaccagtgcattgtactgtgcaaaaccttatcgagttaaaatataacgttttagatacattgcgaaggcatgtatgaagatgtatgatcacatgcaagtcacaggcactgactctaaaataacctatgtacttgatttcctctgccacttcttggctttccatttccgtcttagtgctcagtccttgccgctttttgctcactgagtagaactgagcacgccccttagtattacataatcaccacgctcgctcactgagcatcacctgatcgttatataagctggatgactcgctcactgagcgtcacctgagcgctctgatttgctcactaagtagcctgatcttactcactgagcttgacctgagcgctctgactagctcactaagcacgacctgattattatataagctcaagactttgctcaccggagcgaagcgtagggagcagctaagtcagcagctcacctcaataaaatgcaccacgctagccccatccaaatgcagttgttcacaaggactcttgaccgttgtcccctcaacaaaaggctggcgtcatcaatttggcggtcgatcctggttatttcgcctccagctaagaggcaaattgatagtggggctacattcattggttttactattctgcggctatactactattcaactcgccgagtctcgcattctacaataccgtctctatatagttgcggaaaatatccagccctcaatttttggttctataatatctaggaatatctcagaaaaccccaattgagtggcttataaatctagtttagtgtttaattcttattttttaattcttttgtattttgcttgaataacactggtttatcgctcttgttgcctgcccgcttgctcctaggaataccacttcagctctagcgacctaggtatccgcaaaaatattctagactaatcgattatgtctactggggtgatctagctgcctataacgaaatttgagtccccttatttgtctaacgtactctaacgtatttaaactagcaatcagaaaataacttatcctagctgaagtccgagaggacttcctaggagctctagaccttttcgtgccaccgcaaacccaaactatcaaataccattggggccccagtgttgggtccgggtccgggtccgatatctcgacccaaccccgggttgtgcgacagactaaaccttcgtccgtttcctatcataattttacgatttgtataccattacttactaccgaggacggcagccaccttcaggagggggcacctatcaggctatggctggtcatatgacctgagccgtatattatcattagactagacattataatatcattatctttccaccagctataggctttcacgcaacagcaatagaggaaataatatcaaaagcaaaagccacaaccacgccgggtcgacagagacgatccgctccttggataagaataagagcccggatctagctagacaattgaaaacaagatgacataaagcaacgaacttctctcagcgcgaactgtctagccaaatgatcatgtgcaaagcagatgcaaatgcattcaagcctgcatagctgactcccacaacctgggaatctggtccgggaaccctctgtttggacctcagatctttgacggagatttggccttgcaagatatcggatcgctcccagagtgctggtacacgctcagaaacatttgaaatcgtcgccccggtccaatagtccaccgtagttcgccagtcttcgccggccaaatcaatcttaaccaacggacggaagtcaacatccttgaaaatcaaaatgaccccatctgggccagcatagtccaacgcatacttgagtgaggaagtagcgtataaaccgggtccgaactcgttctgaagcgtgtatgaagagacgaggggcgcgaagagtgaggctaggctgactattgacggacgtgataagcccttgtaaagaagattgccgccaagtgaattgatgaatgtattcatcaaatcaacgtaattttcatcacggttgttcttctttcccttcagttttgtcttaatgcaagaaatagttggcggaaaagattggaggcgcgcaaaggggaagacatcttgaatcctgttttgagtaggagttgttgtgagatttgggggaataaagctggcataagaaagcgcggaagcctggcgtcggacaggttcttcatagatcttgtccatgaatgttgctggtatcttcccttcttcaaacaaaattgaaacaatccaaagacgcggagaaccctgtgggatcgaacggtactcatctgtaagaacatatgcgggatcgcgaatgagctcttcgagctcttccaccccctcaagccaaaaaaggcttgacaacggtccgatgaacaaggagacctgctcgccatcctcatatagatactgtgatatctcttctggaatgacaccggggaattcaattcctgcagcccaaacaggttggtagtcggttgcgtacagatctagtatatctctctcgtctctcattgtgaaggtattttggtcacttcgagtttgagatggagttggtggcgaacggcaagagctcttcgaggtggagtcgttatcactggtcaatgacggtggggttttggaatgtgggacgcctggttcggtctcggctagcggcagtggtggtacagcaataggaagactgatactagacgcaactgtaccaggggaaaactcccgctttctctttgaacttcgagcttccattgtcaagtaacagaaaggtgaggttgtcaaggaaaaaaaaaaaccttggaagaacagaaatggaaagagttgttgtggtggacggaattacggttatgaaaggttaccagcgaaattttgctggattacatgtattataccagaacctgtcaggtgacctaatagtatactcccgataagcaaaaacatacacgtgacgtaattagcgtgttgcattttattgatggtgcttactcaggccgctcatgcctacgccccgcaaaaagggcgggttttggtcactgtattcgagcccgcagcttttgcgggctaggtagtagtctcgagtacagcgaccatcgaagccttttgggcagtagaaaagcatcgttactttcaacagaatgactaaatcggtctcctgggccaggtcgtttgggtatactctgaattagactaagtgctcattagaggactctgagcggtctctgagtaatcagcgagcatccaatcagactcactgagtgctcagtgagcgttcattggatctcactgttgagtcacgtgaatatatctgagcagctcactgagtcggagcgcggactgaaatctactcagtgagcctggctctgagcgccctcataaaagcggcggcagctaagataggaaaaccccacccggcagaggaaatcaagtacgtatagctacctacgtacttgatttcctctgccacttcttggcgttcccttaccgttttattgctcactgagtaaaaccgagcatgctcccgagcggtctgatccgcttaactaccgtgtagctacctaggtagtccggggatattcccaattccggtttattacctcggtagttagaacgtgacacactcaagtcacttgattagcatgcaggtaccgagttcgtcaataaataaatcaaatcaaatcaaacccatcaactaaataagcttgtgcaaggtgaatctgcgctatggggcgtctcggaatgcagtggagttggggaggagccgaggcacacagtacttcggcaaaacgtcatgaacatccatcccatccccggtggtcttaagttctaaacgttcttcacctcctgacacattccatcttcttctgctctttataggttctacgttacacctgaaaataggtcaataggccaagctcttcccatcatgtctcaaccaggagccgagcagagcaaggcagcatctgctgctgttcaacagagtgataacatcgcgcacgcgctggcgggtgcaggagggggtgttctgtcgatggtcttgacgtatgcttcccgcattttccccatcgctgctgctaaccccatatccattctagataccctctgatcactctgtcgacgcgagcccaagtcgagtcgaagcgtgcgcactcaaccacccttgatgccatacgccgcatcgtacagagggaaggtatatctggactatattccggcctggaatcagcgttgtttggaatcagcgtcaccaattttgtgtattactattggtatgaattcacgcgttcggcctttgagaaggccgccatcaagggaggccgagcttcgaaaaagctcacaacggtggagtctatgattgcgggggctattgcagggagtgccacggtgctgattaccaacccaatctgggtcatcaacactcgcatgactgcccgcaagtccgaggcggaggcaacattgcctggtgccaagaaaacgaaggcatccaccttcagcaccctcatagacctgctccggcaggagggccccaaggctctatttgcaggcgtcctcccggcgttgatcctggtgatcaacccaattctgcaatacactattttcgagcaactgaaaaatatagtggagcgccgccggcgtatgacgccgaaggatgcgttctacttgggcgcactgggaaaaatcttggccaccagcctcacctacccatacatcaccatcaagagccgagcgcatgtggccagcagggatggccccaaggagagcttgaacggaagcctgaagaggatcattcaggaagaaggctggaagggactttacaagggtaaacattctttggaagtcatactggatgttcactaacatatcctcaaaggtattggaccgaaggtcacccagagcgccatcactgctgcattcctttttgcattcaaggatgtgctgtatgatctgatggtgtctgcccgtagaagaggtcgcatcgctaaatagacaggaaatggctccaagcctaccggacctatgtgacaactcatacagccacacttcatggggagacaaggtccggaccctcactgtccactatgtatacttgttcgagtacgaggaattcgagcgggcggctttcacttcactttctcactataaagaatgacttggtgaaggttcttgaagttattggagctccaaggagcccttctaaagcgatacccaggtactcaaatatgtagtttagttatttatttgaaattcactcttatactcctttaattaaagaatccatttggacctgaccgccttatctttgattcaccgcccatcatcgcctatacccgcgttatcgcgttctcgacgcgattctgctcaatttctccacactttctcctgtatcttgtgcactctggttttcagttctggcattgattcatctgcccctctgcctctctgtgcctcaatatttctttgagcttctacacgtatctctcccaggtgtgcttctcccggtcgtttaggtggaaaactcctaatgctttgacagtccaagcttgcctctccatcgtcgcatcatcacattatctttgtgaccctcgtaccactagttagaactatctgcgctcgctacggatattgtctatcccacctattcgaaaccaatatcttgcgcgactgttttgcctaagctctaatagagctagctgtcaaggctataccggaacaattaatttcccaccaaagccatccaaagacataggcttctttcttttaaaggaaggaacagaaacacacccgaggaatcggctagttggaaggcaacaacggaaacctcgcgtttagtgtgaacaaagtgagagccggggccgatgttatgtctttctcactttgccatcgtccgacaccagacgtgagccagccaaaattcatatcaatcaagtcgttcatgtgagagctttcttctttcttttcacattcatacctgacgcttttcttccctttctagcctagaacatcagttgtgcttctaaaatgtctcacggcttttccagtcttaatggccagggtatagttcctgcattccctggtctgtcagcccgaagcatcccagaagatccagatatccaacgcgagactctgcgattgctagtgcagtattctagggtctcttctctaccggagaatccgtccactccggccacctctggtaatacgagagacgaggtcagagatgtctggcagagtccgcggactgaagtccaacctagtgagggctcacctcttcaaatatcacctcgactcatgggttcatcaagtggcagccatgccactcaaccttctccttcccactctatcgctccttcctctggcagtccaattcgggtttcccctcgcacttcttcgcgcgcttcttcccgcgcttcttcccgcgcttcctcccacgctccttccagggctccttcccgacttccatctccccagtctgtttctgtctctatcccttcctcacatggcatctctccaagtcaccgggagcgccaacggactcttagggaaagtgtggcaatctcaaatgccagtaggaacgatgagataactgcacccatgccaaagcagcatttctcttactcacagggtgtcatgtcatctgcctccagatcccctcactcccggtcaatatcgccaacctccgagcaaaattttattcgtcgttctagccgaaatagagccaaaccgattaattattacgccaatccttgggtcaatgttcccgttgaatctgaagagccagacattaatgtcgaagctattccggacacagtcgcgtcttctccacaggagccgcgtcgcgttttaccccgtcgtccaaatgtccaaaagctgctgtatagccgtgagcttggaggcggaaatcatcgccccattctcgccgatgtggtctcagatctgagaccatggaaatcatggcaaggcgcttcgggcgatctgcttgttctggcttggtcgcctgatggtactcagtttgcggcaggcgccgcagctaaatcagatgaacataatatgcagtacaacaagacgaacaatctccttttaggtgatcttcaaagcaatcgtctaagggaaattccagaccattggattccacgccccacaacttcgacagttgatgacccacggctgtttatgagtgtcaataatatgcagtggattggcaaccgactctacaccgctagttttgacaaaactgtcaagatttgggacgtggaatcaatctgcaacgtatcctgcactcataccttgcagcatgattcccgggtggcagtgatgtccgtctcgagattcgatccggatatattggctacagggactgaatcaattttggtctgggacacacgagatcccgaaaatatgacatcgactctccttcccatcgaccgcgatgcacggtataagcccaactttgagttctcatcgacggccctggcctgggggcatactccgtcgactaaggaattcttagccggaggtctggccgaaataggggaggatccagtatacaaaggtcacctagggttatggcgagctcgcgaatctgcgtttgagaccatcaagatggcttccaactcactaaatgtctttgacatcaaatggcactcttcgttgcccttttttgcaacggccagccctgaggatcctcacaacgcacgcatgaaaggtattggcattaccacgaaatcaatagtgagggtgtttagcctcaattgtgacctccaaaagcgcgtgccgtccgtgctggaattctcctgcccggccttagatatcaacgaggtcagtttctgtccaatgggttcaaacagcacatatgtcaccgctagttgcacggatggaaaaacctatgtttgggataatcggaggggcgatagaattcttcacgaacttcgccataactctccccttaacccgatggatcaccaacgaagccgggaaacggcagacgtgggcgtcagggtagctctgtggggttcgtctatggaccaattctacaccggtgcgtccgatggtgttctcaaacgatgggatattcgccggtcaccagaagatgtcctcgtcgaggatgtcgcatcttttgatgaggagatcatgtgcgcatctttcaccgatgatcaatctcaactcctcgtcggggggtctggagggggcgtgcacgtgctctcatcgggaccttattcggatcctaacataggaactttccagttcgaacatgccccagaacccgaagagcatagtgttagtggtatcgttgcgggaaatcagcttgtctcatccggccaggttgtaaagcacgaaacatttgggatgggtcaagggccctcttacacggggccttttgctatgtgggctaggaacgcaaaaaaaaacgtttctcttggtcgaattggggatcttcctttgctcaaaagatatcagagccaacaattggatggaccaccgcctgaagatcgtcacgaactcgatttgaatcagcgacaagaggtcgaaagacaaatacaaattgccgaaatacgaaatcgaggattccataagagaaaacgccaggagccttctatgatcgtctttcaaggccctatatatttgtcttcccttggctcttctcggccggggaagaagaggaagaaaaaagccgagagaatggatgtgaaaagggaaggaaatcaagagggaaatggagcagacaacagagaagataaagcgaaaaagaaatctcggacgaaaaagaaggctcgcaggttcgcgtctcggataattagcaacacagaatatgtcgaccttactctcctggattcagacacggagatggagacgtcaaaccgacatcggttcaacctcgaggaactacttgaggctcttgaagaagataactggttcccggctagtggggaaatcgatcctaacttccaaaaggagatcgtctaatgtggcagctttcttgatattgttgatgtgttttgcatagcattgaagcgtggagttcagatttggttgttttaaataaattcacgttgcagcgaacgggtttatcaatgatgtttgtgtatgtatgatcgataggctgcaatctcgaatgtggtagcctgtagatatacaatgatgttactatatatataactatagttaactatcagggtccatgccacgtgatccggatgacgcgtaatggatccaaaagcatacgaagacggaacaaggcacattttcttattatagaaaacaggaggttggaatagtagaaaataagaagaataatgcatggtagagattgctatgcaataggaataatcatacataggcgcatgcggatactttcgaggtacttcctcaacccttatcaacttcgtatccagtatatgggcgacggatcggaccactacgacaaaactaattttctgccgagcagaaaattagtcagctagccatacgctgttccacagctgtaatgagtatacaacaatttatattttctctaattactcactttccaacggtcgcattaagtttaaatttgaaggtctaattaattaaaatgcccctctctaaaagagttataaatttcaaactaattacaactattagaagctaataagtaagtatacctaagtaagtaagtatagagtaagcaagtaagtgtttcgggaggaaaatgtcttcctggaccgccttcctattaaatatactgccgactaggagtttcaaatcggtagaactagcagaattctaaaaggcggtaaattctagtatagggcattaagatagaggaatagaaccttatagcatcgataactaagcaattttataaatactaagactattttatacctagtagattattctaggtcatataacctccccgtataccaccatcttctcctccttacgcaaattgatattttccaaagtatacgtattctttatatagtacactctcctctcttaaatatggtactaccattatagagagaggtaatctactctttaaaaggtttaaggttaattgatagacgtatactagaggtaaatgtaaagaggttgcaatattacatacaggcctaagacaataatcatataggcggtgattagagcggtgagccaaaaattagttttgtcgtagtggtccgatccgtcgcccataccagtaatgtaagtggcgatacaaatcaaattgcatctctcgcgttgcaatttattatggggacatatctcaaacttatatttccccaacaattcctttgtctaccatatacctagtcatcatcactaggtacattcacatatcgcttggctccgccgaaaacgtgtgtgtttctatactcgacgctcattcgcccaaagagattcgtcatcgacaaaccggcgaaccaacccgccctttttcctccattaattagtgaagcggacacatatcctcaccggaaaccattgagcggaattgcctcaccgcagctgcttcctcgcccttctcgggtaagtgacaccaagtgcgggttcttgtcgggggggggggtcggcgaattgacgttctctgaaggtagtctagacgttccgggtcgcgcaaaatggctacaactacagtaaccggtcatgggcgacgcgcctccatacgccaggccgaattgcaaattccaaccaaatcctccgttccccaatcaacgagcagtccgatagacaaatttccgccgtacgaagacaccctcgacgccgtcgcggggtcaactcggccaacccgaagcgcctcggtgaaatataccccgagcgaggtctgggaaccgcgaaaagcaaccttctactcacgagagtatgggaacggatcattgcgaaatcccaaacatcgcccacgaaagagcatcagcgaagccatcacgacgatcagaacacgcaatggcagtatgagtgccagtgctcatgaattggccgaagtacttcgcgccccagtctcttaccgactcattgtatgttgattcgcgtttcgagatgagaaatttgcaaaggaaaacctccttcaatcaggccgctcgctaacacactgtctctcaagggtctctgtgtcgtttggtatctgacctctgccctcacaaacacgtcctcgaaatcgatattgaacgctcttccgatgccgatcacattgacgatgattcaatttgcattcgtctccttctggtgtttgctattggtgtatctctccacagttatacctcggttgcgacaaagtatcccaatcctccaacatggaattcgctacccatctcgcgacgtgatttccacagcattgcccctggcagtatttcaattggccggtcacattctgagctctatggccactgcacaaatccctgtatctctagtccacactatcaagggcctttcacctctctttacggttctagcataccggatcctgtttcgcattcgatacgcccgggcaacctatttatcgctgatccctctgactctgggtgtaatgcttgcatgctcgaccggagtgtctacaaatttcttcggtatcttctgcgcatttggtgcagctatcgtgtttgtctcgcagaacatattctcgaagaagctattcaacgaggtagaccgtgcagaatcagatctacaaaccccggggcagcgaaagttggataaactcaacttgctttgttattgctccgggctggcttttttcctcactctgcctatttggtttgtcactgagggttacccactagtatctgatttcattcatgatggtgtgatatcgctatcgggtaagcaaggctcattggaccacggtgctctttctatggagtttttgttcaacggagtctcacactttgcccaaaacatcctggcttttgtgttgctgtcaatggtatctcctgtgtcctattcggttgcatcattggtcaaacgtgtgtttgtgattgtggtagcggttctgtggtttgggagctcgaccacctcgattcaagcatttggcattggcctcactttcgtgggcctctacctttacgatcgcaatagccatgatgatgtagctgatcaaagggcaaacacggatcatttccgtgccgaacagtccattcttccaatgaatgtgcggcacccaagcaagccatgggattccaatggttatgccttccccgcggggagggtttttgaaagtgctctcaactcccatgctgcaccaaacaactccaagaaggaagacgatgggcctgggcatgttcgaccaagaggggccagtctttctcgtgcttggttaccaggcaccaaacaagaatccacttggcaggttagtgattctcaagctgcaacttagcatttgtattttattagttcggtgtacaatatcatggtagcgaggtgttgctcggaagagctttgacgtgactatcctcttcccttgctgtgtttatcctgcctaggatacgcagagtatataaatcatgatgtactttggctgcggcatagtcctaattacgaccggaaatctcaccagatgcgatataggaatatcatgagcaaatttagaataaatagaaggatggtatctgaaaatgtacagagtacaaaaattatatatcaggtgaatgtagctaccgttggtaaggaacaaagtcatcattaggcgaacctttgacagctccagctacggtgcaattctgctcttgggacatgctgtagaggaaataggaacagggaaattgcctgcctcctacaataaatgatgcccgttaacaatttaattggagaaaggaaagggagaaagggggtgaaacggtggcttataaggaaacccggagcggaagtttatccgcctaaccgagtcaatcgagccaatccccgcgagtccatttgccgttgtccttccaaggttagtcagcaaagtgatggtcagcacattatgtaactgcagattccgatgcaaagtgctctctgaacttccaaccgtacccaggctctcaccccctcgccctcctccaccttatctcccaccctcacatctctgttctccttctaatgatgcggccgcagctgtttcgtgcggccgcccggtccctccgggttcctaaggtcactccccgggcattcgcgacgacagcccctcgcgcggcccaggtggaactcaccattggtaagtccaatctttatctaatccatctaagttgatcgataactgatagcttgtttctctagatggcaaaaaggtgtcggtagaaggtaaatactgcctcgagataacttattgaaccttcactcacattctctcccaaaagctggctcggcccttatccaggcctgtgagcaggcaggcgcaacggttcccaggtatgacaaaaccccaccagcccgatttgcttgcagtactaacatgcaccagatattgttaccacgagtatgtgcctctgatcgagtctcacacattgtttttgctaacaccagtcccttaagaaaacttttggttgcaggaaattgtatgtgaaattgacaataccccgtgccacgccattgaggcatgtgtacttacagaaactataggtcgtatgtgccttgtcgaagtcgagcgtgccccaaagccggtggcatcatgtgcttggccggtacaacccggtatggtggtgaagacgaactcaccactggttcacaaggcaagagagggtgtcatggagttccttctctccaaccatccgctcgattgtccggtctgcgaccaaggaggagagtgtgatctccaagaccagtcgatgcgttacggtgccgatcgaggtcgattccatgaaaccggtggaaaacgtgccgtggaggataagaacatcggcccactggtcaagacctcaatgaatcggtgcattcattgcactcgttgtgtccgattcatgaatgacgtcgccggtgccccagaactaggaactgccggtcgcggaaacgacatgcagattggaacctacctcgagcagaacctcaattcagaactctcaggcaatatcattgacctttgccctgtcggtgcactaacttcgaagccctatgctttccgtgcacgtccatgggagctcaagcacaccgaatcgatcgacgtccttgatgcccttggctctaacatccggattgatagcagaggcctggaagtgatgcgggttgtcccgcgattgaatgacgatgttaacgaggaatggatcaacgacaagtcgcgattcgcatgcgatgggttgaagacccaacggctcacaacgccactcatccgtcgggagggcaaattcgttcctgccacctgggaacaggctctaacggagatctcatcggcccacaagaagttgcagccacaggccaatgagttcaaggctattgctggacacttggttgatactgagtcgctcgttgccatgaaggacctggcaaacaagcttggctctgacaatcttgccctggatcaacctggaggtggtgcccctattgctcacggtatcgatgtgcgctccaattacctgttcaattccaagatctatggaatcgaggaggcagatgcaatccttttggttgcgacaaaccctcgtcatgaagctgcagttctgaatgcccgtatccgcaagcagtatattagatctgatctcgaggttggacttgtcggcgaggaatttgagagcacatttgacttcaaccatctgggcgctgatgtctcttccttgaaatccgctttgtccggagaatttggcaagaagcttgccggagccaaacggccaatgattatcgtcggtagcgctgctgcagaacaccctgatgctaaagcaatcttcgaggctgtcggtggtttcgttgagaagcatgcgagcaactttattaccccggaatggcagggctacaatgtcctccagcgtgcggcgtctcgggctggtgcctatgaagttggcttcaccacaccatcttcccaggttgctcagactacccccaagatggtctggcttttgggcgcagatgagatcgcccaaagcgagatcccgaaggatgcgtttgtcgtctaccagggacaccacggtgatcgcggtgctcaacttgctgatgttgttctcccgggcgctgcatacaccgagaagtcaggtacatacatcaacacagaaggtcgtgtgcaagttacccgtgctgccacttccctccccggtgcagctcgtgatgactggaagattatccgtgccactagcgaattcctcggcgctcctcttccttatgacgatattgaggctctccgcgaccgcatggaagagatcagccctgtcatgcgtcgctacgacgttgttgagccgacctcggttgtctcgttgagcaaggtccagcttgtggaccaaaataagggatctcaagctactggggctcctttcaagaaggtgattgaagacttcttcttcactgacgctatctccagaaggtgagtaccctggttgttaatcgatttgcattgctaaccctgctttagttcgcccaccatggcccgcgcctccgctgccaaggccactggaaaccctgagaccaatttcatggccgcaggagaaatgtctcctcaggccttgtatggttagatcggggtctatcttgacctcattctgtgtttctctaatgtttgcaggcgtttttattgtaccacatcttaaatttccctcttgatgtactgtttcctttccatcctctgtgtttttccctatcatcttgaacacctctccggttcctgttgacctcttcgccattctccggtgtcgcctgggattaatcggtagtggttaccttgtacataaagactgaacccccaaaatttcgagtccatgggcgtcggagatgatgaatatgtgctacttccgtagttttatgcgtagcagctttgaaatgacagaagaagtgaaattatactaggagaaaatgactcggccaaaaaaaaaaggaatatccggacagggagcagaccagatccatgtatcaaggagtctcctgtgtcgattgggcgcttttctgcacttctgcatataagatggaactatatcttgatcttttgaactactttatctgacttgttccaagtggccagtttagagctcatcatcatccgtctctcccgcagtctcctcggcatctttgctgggttgggctggagcagtcttaataggcccgccagaccttttagcaaatggcaaatctctttgaggcggcgctgtgtctcttgctggggaaactcgcttcagctgggcagattcatcctgagacgaatcgtcgtctgtcgtgctactgttctgttcgccgtccgaaggatgaggagtcgaatgctcttcgtccgtatcttgagtattgaaggcatctagattggtttttattgggtcaatatccatttgttcgaatccatcagagtcgtcagtatcgctcatcttgcgagcacttctctttgctgaatgagatctctcggcggctctatctgactctccgggaatgctagcctgtatctcggagactgttgatacttagtcaagatatccaggtttctctgtttgtgccacctacctttggttgaatccacagtagccgatgccagaagacgttgctggttgcgaattttgagctttttctcgttcaagacctgcacaaaattggccaccaatcgattctcatgctcggtcttcgcatgcatgagctcctcgagctgttcattcaacctatgtatggtatcttcggcaagacgatagcggccggtcatgctggatacttgttgctctagcatctgagctctagccgctgtgattcctgtccattcaaaaagttcgacggcttgttcatcgtcttgcttgagggtaaaagcacccaggcgttgctatattagtgttaatatggctatatatagaatccatcgcgtagaacacgaactgtgatagtctggactcgcttccgtatcgtgatcacaatttccttgtcttcatcagagcctgatatactggccgaagcttcgagaccagtggcccaatccggctcatcaggggcagaacattgtcccagaatgagagagactgttttaacccattcatcatctgatccttggtaattctttgcttgaagatcattcaagcgtgattgtttcactgcgcgacatgagctcatgacttccagatttcattctatgacgacccacccaggctaacatagggcgattccccctcggtagccgtcaggctcagatcgagccgagcagggccggtacatgagacatggacgagtacaaaagacccagtctcgtcagacctgggaaaccgcaagactcgaggatccgtcgagacaggagatggcatattgggtgtgttattgcctacggagtaaatgtatggtagtcgttagttaggtactgcaagtcatccaggcaacagagctcaagtggatatgaccaccgtacctatctccacatacggagtacttaaaattaccaatagcggttttttaaattggtcttatagatattacatactataaatacccccaaccggtaaatacatatggcttcaacgtgaatgttctgttaatcacgtggaattcttgttctcatacacgtaatgcactcttcgaagtatgcaggctccaccgaatctccggtaacctgattacctagatacattaccagtacggggcctgtcacgttcttcctctcctccacgaggaatctgaaggtccagccacaaccgacaacacctttctttccccctgtctcctcttcgcttttgcaattgagttcctttggtccagcggccagaatcaagtgtcttggggtgtccctaatgcttaactgtcctcttttaatgaatgtttatggatgaaggcctgccatttatcaggtcgcctagtgaacccgcttggtctcattcggcgaaatcggttctagagcaaggccggcctctattgggctgattattctaactgaactcacttgccactctgcgatcaacagagaagccgtgcttctcacttgcaacctatcttccattcctaccaaccgacgcggaatgacgctcatgttcgcaccccctgaaccctcaccagtgtcgcaaagcactgagtctgccacttaataacaactgcctccggacgcctgtaatcatcccatgaccttcgtgttctccgtacacctttaatcaattcgcttcgctgatcatggaatctttaccaatccacctacgaccgggtaccgacgagctcattgaatgctgggatgatgacgacgacctgcagttcagcgaggatattcaatttcgcaccgcatccagcgctggctccataacgaactcgtcatttcggccctctgggcaccgagattctatttcctctcgacgctctgctcgctcagatattgactctaatgcgggcgatgaagactggcaggtaccgctctacgacaatgatgaatttgcaaaagaagatgctattgcttcggccaagactgcgggcattcccattcctccagatatccccaagtcagctcttattgggggcacgatcaagcggttatcaattcgaaagaccaagcaaacttttgttgacgactggtcagaagacgtcgagctcccaggtcctgaaaccctgttacatctcagaactcctcgggaaaccatatttcctgactctcttcgacatttgagctccgctgctactagtccagtgaaattcactgcctcgccatcttgggatgacgaattctcgacgcgtttgcaatctcccttggaaccatttgacacctttcaagacgacaatggtagcccagaagctcgtatcccaactctcaaagccccaactcctcgatctccgaagaaattgaacatcgacgatgtcggcagtggcttcggtgttgaacgggaagcagacgacgatttcaaccaggattttgaacttcccgccaatcatcaaccacttgaattatcccatcgaaaagataatttttacgtttccagtcccactttagaggactttgatattgagtggtctgaagggagtatcggtgtacgagttggtggtaccgcaagggatggtcgttcagttcccagttcttctatctctatcgccagccccagcgtttcaagctgtctcaccgcggaaagtgaagacgatggcctggacggtatcatcatccccgaaggtccccttgatttcaatgcttctctgcaaaagcgacaggctgcgcaagctgagaatattgaagcggaagagagtcaggtgggccatgtttgttctgacgccgacgacttcttctctggccttgatatcgacaatgagaaggcattttcctttggaaaacctgctctgaatcccaacataaagtgcaaaacagaacggccatccagcccgactcgtcgatctgcaacaacactcacgttcaccagtgcggcaggatctccacggactcgtattccacgcttgtctggtcatgatcggacccattcaacccaccttgagactgtgtccgaaagtggggcgcctctttccaaatttcgaacatcacaatcgcgtctagggcattcgtctcaatcgtcaacttcaagtctcccagcccctatcgttaatccatcaccagcccctacactctctgctcgatggcttcttgggtctcgcaatttccgggacgttgccccggcccctgagggtaacccatcagttaggcgtttaaagaccaagcgatccctgccatcgattcgtggcttaagctcgaccgcttcagtggccgcttcccagcgaccaccggtcgatcgtccagtccgccttccctcgaccagacctaaaacaccggttgatcaccccgcaactgatgcgaggtcgctgagtcgcaggccacaggtaccatttatgccggctggtgtatcggaatcccaatcacatcatgtcaatgtgaaggggtatcgctcgtcacgtcgcacaaattcagatagctccggcgggcttcttagtccgcagagcacggcttctcgactctcccggccaactcgcaatgagccgttccgtgctgggtttagcgacacaagcgcaaactctctcggttcctctacaaaacgtacaatcacacgacccactaaaagacgcaatttcggggacggaacggagttagagtcatttgatgacctatctacatcggtcttggcagagagcaggttcgtcaaaacccccactggtcgaggtgctccaaggttggtccgcgccagactcagccagagccggattgatctgccacgtgatgaatcacctactcaatctttaacgtccccaccaaactccaaattgcgcagtccgacccctaggtttgcgcgagatacaaatgcatccagaaatgcgagggaacaacgcattgcatccatggctattaattcgaaaggccgtgaaccaaatgctctttcgacgttcaactcaaactggaagtcccaacctgtctcaaggattcctccggcctctgcgacggttagaagccggaaaggtaaaccgaatgccagaccaacgtccaagccacacttgatcaagcccatgggatccggggtgcaggatgccaaatgtaagcaagacctctgatctctatttacacgatttgcgcaatcttattaaccgttttcagccgtgaggggtatgcgttacaatcctaccaatttccggtgggaagggaacgaaaatctagttcaagaatttgatgtcgctgctcccaaatcacccaaacctgcaccggctctcatcgccaatgttggcgcgatgcagaatgtccagaccgttggtggcatggtcttcgatccacatcgtatgtgttggctcagggcgtctcttggagctggtgcagacgaagacgacgtgtttgctggtttggacgacttggatgacaaaattaccagcagcaccatcaatggacgaaattccggagccattgaggagcaatttccagcagttggggatgacgcaagtgccggtgaatcctctgatgaaggacctatgaccgaggaatttgatgtcggcccagaattcattcgacgacagcgggcggaggaagataagtggagacgcaaggttgacaaatgggttggattcgaccgaggcgatcacgaccatgaaaatcattgggaatggatcatccgcgatttagtggcttttgaccaccatcggggatcagcatagaagcacgccagatttgacgtctgcatatccacagagctttcccggacaggggtcgccttcttttacccgcatgtgtccatgtactaacccaaccccccaatacacgaacttacgacttgaagacccccatcgattggccgtgacgattcggccgatgtcatgaatttatggttttctcctttttcccgggcatatctgcccatatctgaccaaggtctgaccacgggggcagatatgctatgtaactatatcttttgttttgagtacatacagtttaatatctttttcttggagaggaggctattgtccttctgagcagtctatgcctatctgttgtatattattttgaacattcggactcgataccaacacagcgctctgttttctcaaaaacaaatatatataatcggaaagcagcagagtacatctgtcacaccagatatgttttggactgtctgcaagtctgcaggtctgcgagggtccgaaccttgaagcagtccgatgtgtctcaccttccaaccaaacgtatgtcatcctgttgtcccgccttggtacttctccgtacttctccgtgtacttttctttttccctttacatccacaaccctgcaaaagtcccttctccaagtggacttggtgaatggccacgtcaaatcgaagcctctttctcggatactcacttgcatctcttcccatttgggaattctcccccccaaaaaaaatcaaataaacaatacggtgggacaacatagcccagacacagtacaacattgacatgacagggattgccagcccatagaagacttcaaatctcgagggcccgattcatcacaattgccctagagcacttgtttgtacatcgatgtacacccattgacgatgacccccctcccgttttctctcttttcttccccgcgctctctccctgtcccctcttctcaccgaatgaacccaatggggaggagcttgagggtgcagaacttcctatagtggggattctcaatccatgttccttaccaatttgcacggctacttgcatggacagagataccttttgccgggggtatctcctgccgactttgtttgcgaagcaaacgtgcagaaacaaagagagtttcccccctttcctgattcgaatcgggaagatcctcctacgcgggagtagagttgttccgcaggtctaagtataggaaattcggggagatgatcttcgcccccccgctgtacttcggccaaatcaggagagccgaatgggtttccccccccccccccccaccnnnnnnnnnnnnnnnnnnnnnnnnnnnnnnnnnnnnnnnnnnnnnnnnnnnnnnnnnnnnnnnnnnnnnnnnnnnnnnnnnnnnnnnnnnnnnnnnnnnnnnnnnnnnnnnnnnnnnnnnnnnnnnnnnnnnnnnnnnnnnnnnnnataagggaggccgaaggggtttcccccccccccccaaagtcagcacaatctccgatagggtgcctcgaatagcctgtccactcccatatcctcaacgtggcttcttgaatggtggcgctgattgacctcagggcatcgaaaggcaggaatccgtatcaccattccttctgtgcgctgtcgtatcagcctgcttccacttttcgataccttcggcgggtcggacagaattgaccacgaaccccagtcctttctcactgcttttcttttcttttttcgttagatccatgccgctatcttccctgcaagctttgctaatatgcttccgtaccttacagagctctgttcgactcgcctggctccatcatttctttttctctgtggaatatttgctgttcgtcttccagggatgccctctgttgtctctgcccactatctctgtcgcgacatggtctcgtgcacttcatcttgggcatcagccatgtcagtcctgcactgtctgtccatcgaggtctttttaatagaattgctaccccgtttccagatgggctttctctgaattattcctctttctctctctctatatctcactttcgcaccgagatattatagacactgttcaattatttttgtgatacttgctgtggtgtaccagggtactgtgccaattcttcttcgactacatgcaaatgagttagccaggtcttcgtttcactatcattatcatcatcaccttcctcggagactcgctgtatactgcctttttttttctctctatattttttttaccccttcttattcttcttcttcttcctctatctgtttgaaggatcaacgtgagccgaacaagaatcaagtggcattccgactcagtgaggtatcgattatgagcagctttgcaaggcgcaacgaagggaatgatgcctacctcatgaatcatcaaatggcaatgcctggctcgtacggtcagcaagagagccatgacttcaacacgcatggatctggttcatatcatttccctcaacattctttcaacccatatgggtctcagtttggccatccctacggtccacagtcgagtctgtctccggggttgcagcatttgcagtatacgtcggaacattcgattccatcgatgacaaccccggatgacccccggctgcaccatccgccgcagttcatgtcccagtcgcgctaccttcaagggccgaggtacctgccccgcgacccgctgggtgaaaccgagattgaaagccaggagtctcataacgaggctacgttgctgtcagaggctgtagttcccgcacttagcggcttccctgatgtaaaggagtttgatcaattgatgcagaagtgggtgattcgtgatcaaccaggatggactcgatgctaatatctcattctagctatgttgaggacctgtccatcaagaagcaagataaagcgttgatctatgctaggagggcccgtaacatcagaactgtgttgattgaccccaaagatacggcggtggagtctgctcaatttcggtatgggtctctttggttcaatcaattacctgccttgctaaacaaatcaggttttgggtcaaaaagatgttcaagctccaagctgtgggatctgatgtaagtctcgcctgtcccggtacatatgatctcaatcgatgctgacgagtgatttgttgcgatgtaaagcataggaagatgatctgtcacgagggcaagccggttgcgattcgggaaaaattgttcaagatcctcaccaaggctcatcagcaatgccagcatggtggccgagacaagacatctgctcaggtccgacggatatattcatggtgggaaaatccgtgccgtactatatattatgtacataacatgtctgatgtacagccactgactatctcattagggttcccaaggaactgatctcccgcttcgtcaagatctgcccaacctgtcaggtgcgccgtgggggttctcgattgacgccgcctaattcgcgaagaagctcccccagactggagatggtctctcgatcccccaaacttccgtcgccgccaatctcgcgacgagaatcgacttttgccggtcaacttccccttgacaggacgcaagcagattattttggtcatttacatggtcatggtggctggctagatagtcatcaaaatgtgcaaagtcgctcgaatctaggtaacggagttcgctcgttccagggttccatgggcaatctttcgcactcaattgctggtaccttggattccttctccgccgacctatccattcctccgtcccaattgagttatacaacgggatatgtcccgcacggggctgcacctcagcgagagtattgattggcctttctggtcgacttgtgtggatgttgctttttgagtattatcagggtacactaagtgtgtgctctctaaaagtataccttgccaggagtctctagatatttttgtgcttccttgtgaacgacaagtctgatgagtggcacacacggacagggcaagaagttgattcccatccgctacggggttttgagtgacgccaatattgaatggagggaagggaggaagggatccggaaaaaaaaaggaagaacatgacaagagggaaaaaaaaacacaaaaatacgctgaataatcgaacgactgaattctgaattttgcattgtacaacagtagaccaacgaccgaaaattacagaagttttggcgagaggacctctttgatcgggatatacaacaatcagatatgcacatggtccgcgatcgtattcgatattcgaatgttcagtagccaattgcgggttaattggagcctcgtgtgaccatttctaaatgcatacagatttggcgacatgaaaacatcaattcatagctcccagcgtcggcgcttgaggggggttgcacgggttcaaggcactcggtgcttgtgagataggcgaccacggtgttccaggcaaatataggaccgagtggatcagattcgaaactccatctccgaacctttagaagatcatcaattcctcaactcattcaaacagtagacaggtttttaaacaggaagcgagaacttcttgcccttcaaaaccctgggagaaaaaagcgcataggtcagtgtccgcatcatacgtctgttttttttgtttctttgagcgaattgagcttacttgttgtagtaaatgtaaaagaaatcggagtaaagcaaagtttggatgattccggcgataatgctcacaggctggaaggaacgttggaaggaggcttcggtaaaatagcggaaaatccagttggggatgtagagtgccctatatagtcccagagcaaacagatagtgggtggtgatggtatccgcttccccggttcgttgcagcatgaataattgtggcaatatagcaaccgactccaaccaaatggaaaaagtccagagtatctacatgacgttagtcccgttctttctacaccgtagacagcatggaaccaacctcggagatgcgataatcgcgcggaaacagaatcgcgagcaccgcgctaattccgaggaggtattgaactttgaaagtatcgatattgggatcatgtgtgggtttgtagtcgttgagcatgaggtagatgacgtaggccgaggaaccgataaacagaagcttgaacgtagtgaggtacagggagtcggtgaacgtccagaaaagatctataaggcgcatgagtgattatgatcaacataaagctgacggtgacgtcgaaacctaccaagataccgagtgacaaaaacgagtaggtatagcacctgcgatttgaacgacaacccggaacaactctgcgacgcgccattagttgcaagtcatatgtggccttatagatagcaaaacatacgcttgacgtcttcatcttctgcagaagcatgaagatcgacgccaaatgggagaagtcggcttcaatcgttagtatatcgcgttggttttccattagttttcatgccatacctaataacctgaagatattcattgtgccgaagacggatctgagttaatagtgaatagtgacctaagccaggagagagagggagaaagaaaatagaggaaaggagagagggagacgagtctgagaattgggagactcgaccaaaatagctgagttgttgacacgaaggcaaaaaatggaaggggaacttcgaattacttgcagatcaggtacaatacgtgtatggtatgggtatgtattacacaggacagcgaggaaggcatggaggtacatggaggtacctcttggcaaggcctttcgaagcggcaaaataagtatatatttgtacctacagcgaggaggcggcatcttaagtatctacactatttccctacatatttatagagcgccgaaatgcataatgtcgtcaagtcgtcatattgatacaatcataatcgctacctagacctgcccaataccttgatagtaaaacgccgagatatattgacgttgtagggcaaacttacatttgcctcgctagaacaagtttccacccccaatgctctcatcggccattcgctggagatgaccttcagctagctcgctcttaagagcacatattgagctttcacgatcgagtcgatcccagtctcgaagttccgctcgcttggacctctgtgtctctgcgatctgctcaagtagtttttctttgtcgacatcaagctgagctaaccgcttctccacagcaggatctagaagcgacggaagactccgaccttccggcatgatagtacatagccccgcaagatggttgatccccctctgagccaatggttgagtcacacatggagtgccgggttgccgggaagttggatgtcggtaactgccacctagtaccggagatgagaaagaagcgcgaggacctgctggtggagcttgcgaaggtgcaacaggcccgcgacgtaccggcggtgaccccgtccaagcttcacgtgggccaggtccgcgacgaggacgagtcggcgcggatagtaaagagacatgcggaggaccacgatgttggttagatggcggcctaggtccctgataaggtcctgatggcgggagtggaagtgggcttgcactgtgatttttcggttgagtcgggatgttgccaccaaccctggtcccacttgtctgggattctctctctggaatcgaaaaaggcgaaggattgccaattggtgctcggtcctcatgatctgggcgttgctgtgtgtgaaaaggctccgtatcgtaggtctgatcccggtgcggagatcgaccttggggtttcgacgaccgttgcaagggtaccggggagcgaatcggcgaccgactacgagctttttcgggagccacaacaggcttttctatagccgacgatgaaagtcgagatatcagggcgggttgtgaggccaaggcttgtgcaggtgaaacatctcgtttcgccacatcacgagagtggcctcgatgcgatacatgaattgggctctgtggcaacaagccttctggctgtgctctcggagaggaagctcgggggggtttgtcaatattcaagacagcagaaccatctcgtctcgcggatcggaagacttggcttccaggggttgtatcgcgcattcgtctagggctgttgcgagcacgggatgcgttgcgtgatctgccatcactgtagggcgatttcgagcgccatttttggggcggtgatctgatcctgtcatctcttctgggcgagaatcttcttggtggagatcgtcgtctttcgtaggggggtgggccaaagtttctccccggaggagtacgtgagcgtcgccggtatggcggtggtgaccgactccgtacgcgcccgtaccctctatttgctgacggtacccaagtgtcggctcgtggtcgaggagggcttcggtttcgtggtggcgaacgccggtgacgaatttcatacccccgggaaggggaacgaccgtttctctcggcgggacgatagctttctccacctcttcgttcatcaaatctagggaaatacttagaaactttctttcaaaacgtttggatacgccaacgaaccttctgcgatcccagtccattctggcacggagaatatggatattagaggaggtgagatgaggttcaaagtattctgggttctccgtctcctggggagaagggtgaaagtagatagatagtataaggaattgaagggtcgaatcgcggtagatggaaggaccaagctaaaccccttttagaatcagttcccgtgactggggctcgatatatgtacatacataccaaaactacgcaagatgcttggaatactatttatataaatctacaaagtactccccttgaagtcgcatagattaatcaataagaataagaaatttcattcagaactaaccatacattaaaggctagaaactttccttgcaacctagagtatgaaccaaagcagccaaactccaatgctcatcatgaaaagaagcacacccgggaacccctaaagaaaaaaaatagaaaatcacagtaaaagaagcatccttaatgctttccccgtctctcctcttcctttcggaatcttttgcggtgctcctgtgcaatcatatcactcaagtcctcctggaaaccccagttcggtggattctgctgctgcctctgtgactcgtacatgctctggaggctctctttgctgagaccatcgccagattgaattgcatccaagttgacagacacttcaacatctccaggcttcttgcgtttccgactttggtcatctgcaccaagaacaggaggcttgcctgttgttccgctaaggtcatatgccctatcacccccgaaaaagccttccacgttcgtttgtttctcgggtatgacttgataagcactccgagggtgaatagattcctcggtatcggtaccacgatggtgtttgcgcacatcaaactctccggaaacattctcggcgccaacaaattcagatgggactgccgattcgattccactagcggtttccatgccactacgagaatgagcccctgcacccacgccaccttcgtcactttcttcttcttcgtgttcatcgtcgtcctcctcggcttcactctcctcctctgactcctctgattcgtgtaattctccccaaagctctttttcaaccggctctccttgttgggcatgttgttgaggctgtaaaacgccgaagatatcacctccgaatagggggcggttgtgttcatcgacaggtggctttccataacccccaggctgatagccccacgacgcgccgggtggaggcggcgcattgaggccggggatcttcagcgctgggtaggaagacgggggaccatgtcgctgctggttgacaagccacgggggagggcctcccggggtcataccaagagcgtcctttaactcatcgctcaattcaccaggtcggagatgcttgagattggtctcgtattctttgccctcataatagatttcaccgtaacgagtcagttctggcttggtttggaaacggaaaaatgcctcgtaaagcttctggtaatcgatgtccagcttgcccatctttggctgtactctttcccgttgcttctgcttcaaacttgactgctcctgcttctctaaagcggcgtcacgcatttcagatattcccgtctcctgtatgaattttgggagagcgaacggtgccttctccactccccgtttggatgagagatactctcgtttgagcgaccagtgggagggtaccggaaccacattgcgatgggctttaatgtgaacgaggagtcgaggatcagaggcagatgtatctgtccattccacaatctcaggctttcgtaccattgctttgagttcagcaacggatagcttgttcatttccttccgcttctttttggagatcttgggctcgctatcttgctcttcgtcgggtatttcatcaccatcaaagaagacctcgggtttatcagcctccttcgatgaattgtcgttcactgtctcgtcgaattttccggcaacacctttgtacatttcccatagcggatcggttgggtcaggaagcaggtcagtgttggtatcagctggtgcatcttgagcagtagccactggcgaagatgacagttctcgtgcgatggtgttgtcaatggaatttgtagtctttgtagcagtgttagcattgtatcggccacggctgagaggtttcgagggatatatatgtcttacctcggctttctgggcctttttcttggctcttctgagctggttcttgctcaatttcatggtcgctggaaggtttggcaaccgctcaattaacgcggtgccgagaattaacgcggtgccaagcggagaatattccggagagacgtggtactggcagcttggttcaagtgcgtgcaagggataaactcagctagcgaaagacaatggagtgggggacaaggttgaaaacaaaatagttatatggcatctcaattgccatcacgtgcattcacccgatgccttaccgcctatatctttctacactaggtacaaatctcacgtggtcggagaggttttgtcatttgttacgcaattcatgacctagttaactaactatactttattatatagttaatatatgtttagtccagctacttgtatagaatattcagtattgtgctaataacctagtagacactaaaaaaaggtaaaaaaaaaagataatattgtacaaaatggggggaacaagctctatcagcaaagatagcaaataagttcctaaacaatcctcacttaaagcaaaggatctacatagatttgcgaagctgtagttcactagcccagccacatcatagaaacataatccgattatagaatgtatgccagtattgatgtgaatggtgcaatgttgagcttagcagagccctggaagttaagcagacagtctacttcttcttctttgcggatcttgattctgttcgagtcttagattttgatcatgtcaagtaaccattaggtgtaggagcaaattacctgcagcagttcgcttcttcttcggccggcccttccctcgcaatttggcactatgaatcaaatgtttagtaggagtgtatgtgacatgggacaacaattcttacatctgaatagcttcttctctgtcatcttcggcttcgtcaaatgttgtcaatccaagaggcttataagtgttttgtaaatcttggaaagacacagtctgcttaggataccaggctgcaagcgctggtccacgcaaccgctgtctcaagatcttgtttccaagtcgaagccgttgcgggttgaaattaagagagaatatgcggcattgggtctagaggaattgtcagttagtgaatgtcggcacagcgcaatggaaaggtggatgaaccttaactagatccaagatccgacttgacgccattttgctttctcaaaggttcagaacaatcatatgcaagaagaagggtgaagcagctgttcacagcgacttggtagacaggtgtcattgaacttcggtagcaacagaaagtttgaccggtggtcatgtgacctcccgaagtataccgcctacatatcatccatgtttttacctccaggcgcaagaggaaaactagactaagactgaacaggggctacaacagtcgatatgtctcaagccaaagagatagaaaatccagcaatcttaaaaaggccagtggtagatcttaaaagatcatcatctgtctttgggtcagatggcacacaaaactcacaaaagcggcctaaggtgaataccatgttctcatcccactgagcgaattcctgttgattcgagtgaccttctaacatctacttgcataaaggttcaaccatcaagtcggccatcggatactaagtcctcctctattattgtcagtcacagcatgggcaagtccagcaaccattctcgtatacttcttctacaacgccttgttcgagaaatatcaaccgattctgatctcgctggtgttgactcggagattttggatgcaatttcgaggctggatgacacgtttcgtacgacgaagagtcaattgccttccaaagatccttccatagctggtgaggtcccaatatcacgccacccagatcacagtcccaagtcggtcaatggctcgtttggccttgagctcccccctatcatggatcacaagcttgaacttgctgtctttacccatccagctcttagcaacaataaaaacacgacctacgaccgactcgagatcctaggcgatgcatacattgagctgattgcaaccaaactcgtctgggagagatttccagatttaccagcaggtcggatatcacagattcgggagatgcttgttaagaatgagacactttcgggcttcgcagaaagctttggtttggaccgcagggttgctgtgccgccaaactacaacaccccatcaaagcgatggaccaaaacaaaaggcgacgtattcgaagcctacgtcgcggcaatcatactatccgatcctgtctctggctatgaagtagccgagcattggctagcaggtttatgggtgccaattctcaagaacttgggacatcagaaaggggagttacgctccaaggaggctcttgctaagaaaattatggggaaaagagtcaagcttgaatacatagaggagcgtccatcaattcagcagaagggcggtacacaaaatttcttcgtcgcgttatatctcactgggtggggatgggacaaaaggtttctgggttccggtcagggtttgagtaaagcagctgcaggtgacgaagcagcgaaaaagacgttgctgaacacgcctctgattcttgagatcatatcagcgaaagagtcatgggagtctaactcttaaaatcttggtcatatttcacgattgatcgggtcggtttcttcaagttactagatctcgcattccatttcttactcaataaaatagcacccgatgagtccacccttgcactgtgcagcttaaagacgttcctagaaccccattggcttcggcggagaatatgtaaatccgagattgattctccccaaggaatcaatccttctcacctctatccgtctcttgacctctaccagagacggctggggaagccgcgcaagccgaatgatatctatatcatagaatgacgagtatggaatttgtcttcgtcaacgttcagaagccaagtgacgcccttcagctcgccaaagcacccgaggtccgatctcacgtgacgcgttatcaatggaagcaatctgcgcgtcgagacaagcgaacccgaaggatcttgctaggtgttgcacaggatgtgaatggagctggatttcaaaacggcctccggctcgattcttttaaaccggaaccaccgtcgatattgcctcaaataggcggactccgagttgaccctttccagtcatatcctatctcgggtcaaccgtggactccgctgctggtcgatcactgtaagttactttttgaacttgatttaaacaaggtggactttgttaatatggtaagacttgatacacatggcagttgatattcccgagcttgacctacctggaaaccacggcctcttgaggaccacttggtttccattggtgatgaccgagcccgctttattctctgtcattcttcttcttgctgcatcgcattatgcctccctacaggtcgatcctagcagtatgaaaatcgatctcctcggttttcgttatacagctgtactatccatcaatcgcagtcttgatgctcggcagcccgagaatgtacatgacgctttgataggagccatagcaaagatggcaagctatgaggccatgttcggcagtctcgagaattataatatccacatgcagggtctcgcacgactcattagtttacgagggggtcttacttcactaggcttgaatggcttgctccagcggatggtgctttggatcgactgtaatgccgctttcttacatggatcggcaatgtatttccttatggatacctctgtgccgggtgaatctccgccatacccgaatcctggtcaattcctcgggagctcgtgatacccagcagagtctaaatcatttcattgaaccaatcaaaaccccgcatatccatcggtatgatgtcatgatctcatctatcatatatagttcatgcatttcctaaataggatatcacatctaaagcccgccccacatctcttggtggatatgccccacagatttccgatttcagataacacatactaatgcgggatctgggacatatgtactgtatactacatcataggtccagtcgctgaacatataaggaatgaacacctcacggggaaagatcaaatctctatcaatcggcattactcccccagctactccctatcttcaccacaaaaatggctctcactggtaaagtcgcccttatcaccggcggtgtcaagaatcttggagctgcaagtgcccttgaactagctagtgtcggcgccaatcttgctcttcactaccattcgtccagtggcgaaaaggatgcagctgcgctcaaagccacactccaggaaaagaacccttcgatcaaggtttccttctaccagggtgatctcacctctgcagctgcagtgacaaaattgtttgaagatgttattcgtgactttggccatgtcgatattgtggtcaacacagtcgggaaggtgctgaagaagcctatcacggaaatcagcgaggacgaatatgacacaatgttcgcgtaagtctttggagaagaacatcacgagctctctaggcatggttaacaagactttttttctagggtgaactccaaaactgcgttcttcgtcctaaaggaagccgctgctcatgtgaccgatggtggaaagatcatcagcattgtcactgcgctcctaggagcgtttactggctactatacttcttacgccggcagcaaagctcctgtcgagcactttactcggtattttgccagtctagtgtccattcaggtccttggctaacatctatcataggggtgtttgcaaggagcttcagtctcgcaggatcagtgtgaacaatgtcgccccgggaccaatggatacacgtgagtttactactacaaataatcaagggatacgtttcgttcaaacgatctaacgagatgttaccaacagctttcttctatccccaggaatctccagaagctgtggaattccacaaagcaaatggcatgggcaaccgtcttaccatggtagaggacattgctcctatcattcgcttcctctgtactgatggtgcgtggattaccggccagaccattttcgccaatggtggatatactactcgttgattgagtctttaaattctcatggcaaggctcctggtagatcgaattacaattgaatggggttggggagggggcacagccctattgtattttcttcccttccaagcttctctcgatcatataatgcaaagggagaatgtttgttgaatagaaagcctcattatttcttcactgatgataaattataatatgatattttaaaaatgttcctgtgtagtgaatacgcgcggggccgtatagtaacgaataagtggaggactgttttctatggtacgagtagtaggatactagactaaagagtaaaatgagtataattattaggccttgataggtgctgtagtacctggggaattttggtactattatccggtgctgcggcacctagtactacagtacggaggtccatcccaaaagttcttgtctcactcattttcacgctaatataaaactagtcctagtggcggagaggagatcatgtgaccgggtgctctctctactgggtcgaaaaaaatagaaatctagttggtaaaaaagtattcgctaagaaacggtagaaaagatccagccggtagaaaaaaactatctatcttaaccatataaaggacatgcctgggcgcatgtctcttccgcttggccaaaagaccattatgtcagcccttgcgctaatattattagaacctgtcaggaccctagtacaaagaaggctgatacctgaagtatttgtcaggaccccagtactgagaaggctgatacctgaagtatttgacagaaaaacggtagtaaggcgaatgtatatatggtagaaaaatctcaatcaattctctaattctctaaaaatgataatagtccggaaaacatgacaatctgatagacaacttagtaatcaaataaacaaaataaaatgaaaggatgttttttgggcagaaaaccttctaagttcgtttttctatagaaaaaccagcctggttagttatatgacctaactatattagggataaaaaataatagtatttatccnnnnnnnnnnnnnnnnnnnnnnnnnnnnnnnnnnnnnnnnnnnnnnnnnnnnnnnnnnnnnnnnnnnnnnnnnnnnnnnnnnnnnnnnnnnnnnnnnnnnnnnnnnnnnnnnnnnnnnnnnnnnnnnnnnnnnnnnnnnnnnnnnnnnnnnnnnnnnnnnnnnnnnnnnnnnnnnnnnnnnnnnnnnnnnnnnnnnnnnnnnnnnnnnnnnnnnnnnnnnnnnnnnnnnnnnnnnnnnnnnnnnnnnnnnnnnnnnnnnnnnnnnnnnnnnnnnnnnnnnnnnnnnnnnnnnnnnnnnnnnnnnnnnnnnnnnnnnnnnnnnnnnnnnnnnnnnnnnnnnnnnnnnnnnnnnnnnnnnnnnnnnnnnnnnnnnnnnnnnnnnnnnnnnnnnnnnnnnnnnnnnnnnnnnnnnnnnnnnnnnnnnnnnnnnnnnnnnnnnnnnnnnnnnnnnnnnnnnnnnnnnnnnnnnnnnnnnnnnnnnnnnnnnnnnnnnnnnnnnnnnnnnnnnnnnnnnnnnnnnnnnnnnnnnnnnnnnnnnnnnnnnnnnnnnnnnnnnnnnnnnnnnnnnnnnnnnnnnnnnnnnnnnnnnnnnnnnnnnnnnnnnnnnnnnnnnnnnnnnnnnnnnnnnnnnnnnnnnnnnnnnnnnnnnnnnnnnnnnnnnnnnnnnnnnnnnnnnnnnnnnnnnnnnnnnnnnnnnnnnnnnnnnnnnnnnnnnnnnnnnnnnnnnnnnnnnnnnnnnnnnnnnnnnnnnnnnnnnnnnnnnnnnnnnnnnnnnnnnnnnnnnnnnnnnnnnnnnnnnnnnnnnnnnnnnnnnnnnnnnnnnnnnnnnnnnnnnnnnnnnnnnnnnnnnnnnnnnnnnnnnnnnnnnnnnnnnnnnnnnnnnnnnnnnnnnnnnnnnnnnnnnnnnnnnnnnnnnnnnnnnnnnnnnnnnnnnnnnnnnnnnnnnnnnnnnnnnnnnnnnnnnnnnnnnnnnnnnnnnnnnnnnnnnnnnnnnnnnnnnnnnnnnnnnnnnnnnnnnnnnnnnnnnnnnnnnnnnnnnnnnnnnnnnnnnnnnnnnnnnnnnnnnnnnnnnnnnnnnnnnnnnnnnnnnnnnnnnnnnnnnnnnnnnnnnnnnnnnnnnnnnnnnnnnnnnnnnnnnnnnnnnnnnnnnnnnnnnnnnnnnnnnnnnnnnnnnnnnnnnnnnnnnnnnnnnnnnnnnnnnnnnnnnnnnnnnnnnnnnnnnnnnnnnnnnnnnnnnnnnnnnnnnnnnnnnnnnnnnnnnnnnnnnnnnnnnnnnnnnnnnnnnnnnnnnnnnnnnnnnnnnnnnnnnnnnnnnnnnnnnnnnnnnnnnnnnnnnnnnnnnnnnnnnnnnnnnnnnnnnnnnnnnnnnnnnnnnnnnnnnnnnnnnnnnnnnnnnnnnnnnnnnnnnnnnnnnnnnnnnnnnnnnnnnnnnnnnnnnnnnnnnnnnnnnnnnnnnnnnnnnnnnnnnnnnnnnnnnnnnnnnnnnnnnnnnnnnnnnnnnnnnnnnnnnnnnnnnnnnnnnnnnnnnnnnnnnnnnnnnnnnnnnnnnnnnnnnnnnnnnnnnnnnnnnnnnnnnnnnnnnnnnnnnnnnnnnnnnnnnnnnnnnnnnnnnnnnnnnnnnnnnnnnnnnnnnnnnnnnnnnnnnnnnnnnnnnnnnnnnnnnnnnnnnnnnnnnnnnnnnnnnnnnnnnnnnnnnnnnnnnnnnnnnnnnnnnnnnnnnnnnnnnnnnnnnnnnnnnnnnnnnnnnnnnnnnnnnnnnnnnnnnnnnnnnnnnnnnnnnnnnnnnnnnnnnnnnnnnnnnnnnnnnnnnnnnnnnnnnnnnnnnnnnnnnnnnnnnnnnnnnnnnnnnnnnnnnnnnnnnnnnnnnnnnnnnnnnnnnnnnnnnnnnnnnnnnnnnnnnnnnnnnnnnnnnnnnnnnnnnnnnnnnnnnnnnnnnnnnnnnnnnnnnnnnnnnnnnnnnnnnnnnnnnnnnnnnnnnnnnnnnnnnnnnnnnnnnnnnnnnnnnnnnnnnnnnnnnnnnnnnnnnnnnnnnnnnnnnnnnnnnnnnnnnnnnnnnnnnnnnnnnnnnnnnnnnnnnnnnnnnnnnnnnnnnnnnnnnnnnnnnnnnnnnnnnnnnnnnnnnnnnnnnnnnnnnnnnnnnnnnnnnnnnnnnnnnnnnnnnnnnnnnnnnnnnnnnnnnnnnnnnnnnnnnnnnnnnnnnnnnnnnnnnnnnnnnnnnnnnnnnnnnnnnnnnnnnnnnnnnnnnnnnnnnnnnnnnnnnnnnnnnnnnnnnnnnnnnnnnnnnnnnnnnnnnnnnnnnnnnnnnnnnnnnnnnnnnnnnnnnnnnnnnnnnnnnnnnnnnnnnnnnnnnnnnnnnnnnnnnnnnnnnnnnnnnnnnnnnnnnnnnnnnnnnnnnnnnnnnnnnnnnnnnnnnnnnnnnnnnnnnnnnnnnnnnnnnnnnnnnnnnnnnnnnnnnnnnnnnnnnnnnnnnnnnnnnnnnnnnnnnnnnnnnnnnnnnnnnnnnnnnnnnnnnnnnnnnnnnnnnnnnnnnnnnnnnnnnnnnnnnnnnnnnnnnnnnnnnnnnnnnnnnnnnnnnnnnnnnnnnnnnnnnnnnnnnnnnnnnnnnnnnnnnnnnnnnnnnnnnnnnnnnnnnnnnnnnnnnnnnnnnnnnnnnnnnnnnnnnnnnnnnnnnnnnnnnnnnnnnnnnnnnnnnnnnnnnnnnnnnnnnnnnnnnnnnnnnnnnnnnnnnnnnnnnnnnnnnnnnnnnnnnnnnnnnnnnnnnnnnnnnnnnnnnnnnnnnnnnnnnnnnnnnnnnnnnnnnnnnnnnnnnnnnnnnnnnnnnnnnnnnnnnnnnnnnnnnnnnnnnnnnnnnnnnnnnnnnnnnnnnnnnnnnnnnnnnnnnnnnnnnnnnnnnnnnnnnnnnnnnnnnnnnnnnnnnnnnnnnnnnnnnnnnnnnnnnnnnnnnnnnnnnnnnnnnnnnnnnnnnnnnnnnnnnnnnnnnnnnnnnnnnnnnnnnnnnnnnnnnnnnnnnnnnnnnnnnnnnnnnnnnnnnnnnnnnnnnnnnnnnnnnnnnnnnnnnnnnnnnnnnnnnnnnnnnnnnnnnnnnnnnnnnnnnnnnnnnnnnnnnnnnnnnnnnnnnnnnnnnnnnnnnnnnnnnnnnnnnnnnnnnnnnnnnnnnnnnnnnnnnnnnnnnnnnnnnnnnnnnnnnnnnnnnnnnnnnnnnnnnnnnnnnnnnnnnnnnnnnnnnnnnnnnnnnnnnnnnnnnnnnnnnnnnnnnnnnnnnnnnnnnnnnnnnnnnnnnnnnnnnnnnnnnnnnnnnnnnnnnnnnnnnnnnnnnnnnnnnnnnnnnnnnnnnnnnnnnnnnnnnnnnnnnnnnnnnnnnnnnnnnnnnnnnnnnnnnnnnnnnnnnnnnnnnnnnnnnnnnnnnnnnnnnnnnnnnnnnnnnnnnnnnnnnnnnnnnnnnnnnnnnnnnnnnnnnnnnnnnnnnnnnnnnnnnnnnnnnnnnnnnnnnnnnnnnnnnnnnnnnnnnnnnnnnnnnnnnnnnnnnnnnnnnnnnnnnnnnnnnnnnnnnnnnnnnnnnnnnnnnnnnnnnnnnnnnnnnnnnnnnnnnnnnnnnnnnnnnnnnnnnnnnnnnnnnnnnnnnnnnnnnnnnnnnnnnnnnnnnnnnnnnnnnnnnnnnnnnnnnnnnnnnnnnnnnnnnnnnnnnnnnnnnnnnnnnnnnnnnnnnnnnnnnnnnnnnnnnnnnnnnnnnnnnnnnnnnnnnnnnnnnnnnnnnnnnnnnnnnnnnnnnnnnnnnnnnnnnnnnnnnnnnnnnnnnnnnnnnnnnnnnnnnnnnnnnnnnnnnnnnnnnnnnnnnnnnnnnnnnnnnnnnnnnnnnnnnnnnnnnnnnnnnnnnnnnnnnnnnnnnnnnnnnnnnnnnnnnnnnnnnnnnnnnnnnnnnnnnnnnnnnnnnnnnnnnnnnnnnnnnnnnnnnnnnnnnnnnnnnnnnnnnnnnnnnnnnnnnnnnnnnnnnnnnnnnnnnnnnnnnnnnnnnnnnnnnnnnnnnnnnnnnnnnnnnnnnnnnnnnnnnnnnnnnnnnnnnnnnnnnnnnnnnnnnnnnnnnnnnnnnnnnnnnnnnnnnnnnnnnnnnnnnnnnnnnnnnnnnnnnnnnnnnnnnnnnnnnnnnnnnnnnnnnnnnnnnnnnnnnnnnnnnnnnnnnnnnnnnnnnnnnnnnnnnnnnnnnnnnnnnnnnnnnnnnnnnnnnnnnnnnnnnnnnnnnnnnnnnnnnnnnnnnnnnnnnnnnnnnnnnnnnnnnnnnnnnnnnnnnnnnnnnnnnnnnnnnnnnnnnnnnnnnnnnnnnnnnnnnnnnnnnnnnnnnnnnnnnnnnnnnnnnnnnnnnnnnnnnnnnnnnnnnnnnnnnnnnnnnnnnnnnnnnnnnnnnnnnnnnnnnnnnnnnnnnnnnnnnnnnnnnnnnnnnnnnnnnnnnnnnnnnnnnnnnnnnnnnnnnnnnnnnnnnnnnnnnnnnnnnnnnnnnnnnnnnnnnnnnnnnnnnnnnnnnnnnnnnnnnnnnnnnnnnnnnnnnnnnnnnnnnnnnnnnnnnnnnnnnnnnnnnnnnnnnnnnnnnnnnnnnnnnnnnnnnnnnnnnnnnnnnnnnnnnnnnnnnnnnnnnnnnnnnnnnnnnnnnnnnnnnnnnnnnnnnnnnnnnnnnnnnnnnnnnnnnnnnnnnnnnnnnnnnnnnnnnnnnnnnnnnnnnnnnnnnnnnnnnnnnnnnnnnnnnnnnnnnnnnnnnnnnnnnnnnnnnnnnnnnnnnnnnnnnnnnnnnnnnnnnnnnnnnnnnnnnnnnnnnnnnnnnnnnnnnnnnnnnnnnnnnnnnnnnnnnnnnnnnnnnnnnnnnnnnnnnnnnnnnnnnnnnnnnnnnnnnnnnnnnnnnnnnnnnnnnnnnnnnnnnnnnnnnnnnnnnnnnnnnnnnnnnnnnnnnnnnnnnnnnnnnnnnnnnnnnnnnnnnnnnnnnnnnnnnnnnnnnnnnnnnnnnnnnnnnnnnnnnnnnnnnnnnnnnnnnnnnnnnnnnnnnnnnnnnnnnnnnnnnnnnnnnnnnnnnnnnnnnnnnnnnnnnnnnnnnnnnnnnnnnnnnnnnnnnnnnnnnnnnnnnnnnnnnnnnnnnnnnnnnnnnnnnnnnnnnnnnnnnnnnnnnnnnnnnnnnnnnnnnnnnnnnnnnnnnnnnnnnnnnnnnnnnnnnnnnnnnnnnnnnnnnnnnnnnnnnnnnnnnnnnnnnnnnnnnnnnnnnnnnnnnnnnnnnnnnnnnnnnnnnnnnnnnnnnnnnnnnnnnnnnnnnnnnnnnnnnnnnnnnnnnnnnnnnnnnnnnnnnnnnnnnnnnnnnnnnnnnnnnnnnnnnnnnnnnnnnnnnnnnnnnnnnnnnnnnnnnnnnnnnnnnnnnnnnnnnnnnnnnnnnnnnnnnnnnnnnnnnnnnnnnnnnnnnnnnnnnnnnnnnnnnnnnnnnnnnnnnnnnnnnnnnnnnnnnnnnnnnnnnnnnnnnnnnnnnnnnnnnnnnnnnnnnnnnnnnnnnnnnnnnnnnnnnnnnnnnnnnnnnnnnnnnnnnnnnnnnnnnnnnnnnnnnnnnnnnnnnnnnnnnnnnnnnnnnnnnnnnnnnnnnnnnnnnnnnnnnnnnnnnnnnnnnnnnnnnnnnnnnnnnnnnnnnnnnnnnnnnnnnnnnnnnnnnnnnnnnnnnnnnnnnnnnnnnnnnnnnnnnnnnnnnnnnnnnnnnnnnnnnnnnnnnnnnnnnnnnnnnnnnnnnnnnnnnnnnnnnnnnnnnnnnnnnnnnnnnnnnnnnnnnnnnnnnnnnnnnnnnnnnnnnnnnnnnnnnnnnnnnnnnnnnnnnnnnnnnnnnnnnnnnnnnnnnnnnnnnnnnnnnnnnnnnnnnnnnnnnnnnnnnnnnnnnnnnnnnnnnnnnnnnnnnnnnnnnnnnnnnnnnnnnnnnnnnnnnnnnnnnnnnnnnnnnnnnnnnnnnnnnnnnnnnnnnnnnnnnnnnnnnnnnnnnnnnnnnnnnnnnnnnnnnnnnnnnnnnnnnnnnnnnnnnnnnnnnnnnnnnnnnnnnnnnnnnnnnnnnnnnnnnnnnnnnnnnnnnnnnnnnnnnnnnnnnnnnnnnnnnnnnnnnnnnnnnnnnnnnnnnnnnnnnnnnnnnnnnnnnnnnnnnnnnnnnnnnnnnnnnnnnnnnnnnnnnnnnnnnnnnnnnnnnnnnnnnnnnnnnnnnnnnnnnnnnnnnnnnnnnnnnnnnnnnnnnnnnnnnnnnnnnnnnnnnnnnnnnnnnnnnnnnnnnnnnnnnnnnnnnnnnnnnnnnnnnnnnnnnnnnnnnnnnnnnnnnnnnnnnnnnnnnnnnnnnnnnnnnnnnnnnnnnnnnnnnnnnnnnnnnnnnnnnnnnnnnnnnnnnnnnnnnnnnnnnnnnnnnnnnnnnnnnnnnnnnnnnnnnnnnnnnnnnnnnnnnnnnnnnnnnnnnnnnnnnnnnnnnnnnnnnnnnnnnnnnnnnnnnnnnnnnnnnnnnnnnnnnnnnnnnnnnnnnnnnnnnnnnnnnnnnnnnnnnnnnnnnnnnnnnnnnnnnnnnnnnnnnnnnnnnnnnnnnnnnnnnnnnnnnnnnnnnnnnnnnnnnnnnnnnnnnnnnnnnnnnnnnnnnnnnnnnnnnnnnnnnnnnnnnnnnnnnnnnnnnnnnnnnnnnnnnnnnnnnnnnnnnnnnnnnnnnnnnnnnnnnnnnnnnnnnnnnnnnnnnnnnnnnnnnnnnnnnnnnnnnnnnnnnnnnnnnnnnnnnnnnnnnnnnnnnnnnnnnnnnnnnnnnnnnnnnnnnnnnnnnnnnnnnnnnnnnnnnnnnnnnnnnnnnnnnnnnnnnnnnnnnnnnnnnnnnnnnnnnnnnnnnnnnnnnnnnnnnnnnnnnnnnnnnnnnnnnnnnnnnnnnnnnnnnnnnnnnnnnnnnnnnnnnnnnnnnnnnnnnnnnnnnnnnnnnnnnnnnnnnnnnnnnnnnnnnnnnnnnnnnnnnnnnnnnnnnnnnnnnnnnnnnnnnnnnnnnnnnnnnnnnnnnnnnnnnnnnnnnnnnnnnnnnnnnnnnnnnnnnnnnnnnnnnnnnnnnnnnnnnnnnnnnnnnnnnnnnnnnnnnnnnnnnnnnnnnnnnnnnnnnnnnnnnnnnnnnnnnnnnnnnnnnnnnnnnnnnnnnnnnnnnnnnnnnnnnnnnnnnnnnnnnnnnnnnnnnnnnnnnnnnnnnnnnnnnnnnnnnnnnnnnnnnnnnnnnnnnnnnnnnnnnnnnnnnnnnnnnnnnnnnnnnnnnnnnnnnnnnnnnnnnnnnnnnnnnnnnnnnnnnnnnnnnnnnnnnnnnnnnnnnnnnnnnnnnnnnnnnnnnnnnnnnnnnnnnnnnnnnnnnnnnnnnnnnnnnnnnnnnnnnnnnnnnnnnnnnnnnnnnnnnnnnnnnnnnnnnnnnnnnnnnnnnnnnnnnnnnnnnnnnnnnnnnnnnnnnnnnnnnnnnnnnnnnnnnnnnnnnnnnnnnnnnnnnnnnnnnnnnnnnnnnnnnnnnnnnnnnnnnnnnnnnnnnnnnnnnnnnnnnnnnnnnnnnnnnnnnnnnnnnnnnnnnnnnnnnnnnnnnnnnnnnnnnnnnnnnnnnnnnnnnnnnnnnnnnnnnnnnnnnnnnnnnnnnnnnnnnnnnnnnnnnnnnnnnnnnnnnnnnnnnnnnnnnnnnnnnnnnnnnnnnnnnnnnnnnnnnnnnnnnnnnnnnnnnnnnnnnnnnnnnnnnnnnnnnnnnnnnnnnnnnnnnnnnnnnnnnnnnnnnnnnnnnnnnnnnnnnnnnnnnnnnnnnnnnnnnnnnnnnnnnnnnnnnnnnnnnnnnnnnnnnnnnnnnnnnnnnnnnnnnnnnnnnnnnnnnnnnnnnnnnnnnnnnnnnnnnnnnnnnnnnnnnnnnnnnnnnnnnnnnnnnnnnnnnnnnnnnnnnnnnnnnnnnnnnnnnnnnnnnnnnnnnnnnnnnnnnnnnnnnnnnnnnnnnnnnnnnnnnnnnnnnnnnnnnnnnnnnnnnnnnnnnnnnnnnnnnnnnnnnnnnnnnnnnnnnnnnnnnnnnnnnnnnnnnnnnnnnnnnnnnnnnnnnnnnnnnnnnnnnnnnnnnnnnnnnnnnnnnnnnnnnnnnnnnnnnnnnnnnnnnnnnnnnnnnnnnnnnnnnnnnnnnnnnnnnnnnnnnnnnnnnnnnnnnnnnnnnnnnnnnnnnnnnnnnnnnnnnnnnnnnnnnnnnnnnnnnnnnnnnnnnnnnnnnnnnnnnnnnnnnnnnnnnnnnnnnnnnnnnnnnnnnnnnnnnnnnnnnnnnnnnnnnnnnnnnnnnnnnnnnnnnnnnnnnnnnnnnnnnnnnnnnnnnnnnnnnnnnnnnnnnnnnnnnnnnnnnnnnnnnnnnnnnnnnnnnnnnnnnnnnnnnnnnnnnnnnnnnnnnnnnnnnnnnnnnnnnnnnnnnnnnnnnnnnnnnnnnnnnnnnnnnnnnnnnnnnnnnnnnnnnnnnnnnnnnnnnnnnnnnnnnnnnnnnnnnnnnnnnnnnnnnnnnnnnnnnnnnnnnnnnnnnnnnnnnnnnnnnnnnnnnnnnnnnnnnnnnnnnnnnnnnnnnnnnnnnnnnnnnnnnnnnnnnnnnnnnnnnnnnnnnnnnnnnnnnnnnnnnnnnnnnnnnnnnnnnnnnnnnnnnnnnnnnnnnnnnnnnnnnnnnnnnnnnnnnnnnnnnnnnnnnnnnnnnnnnnnnnnnnnnnnnnnnnnnnnnnnnnnnnnnnnnnnnnnnnnnnnnnnnnnnnnnnnnnnnnnnnnnnnnnnnnnnnnnnnnnnnnnnnnnnnnnnnnnnnnnnnnnnnnnnnnnnnnnnnnnnnnnnnnnnnnnnnnnnnnnnnnnnnnnnnnnnnnnnnnnnnnnnnnnnnnnnnnnnnnnnnnnnnnnnnnnnnnnnnnnnnnnnnnnnnnnnnnnnnnnnnnnnnnnnnnnnnnnnnnnnnnnnnnnnnnnnnnnnnnnnnnnnnnnnnnnnnnnnnnnnnnnnnnnnnnnnnnnnnnnnnnnnnnnnnnnnnnnnnnnnnnnnnnnnnnnnnnnnnnnnnnnnnnnnnnnnnnnnnnnnnnnnnnnnnnnnnnnnnnnnnnnnnnnnnnnnnnnnnnnnnnnnnnnnnnnnnnnnnnnnnnnnnnnnnnnnnnnnnnnnnnnnnnnnnnnnnnnnnnnnnnnnnnnnnnnnnnnnnnnnnnnnnnnnnnnnnnnnnnnnnnnnnnnnnnnnnnnnnnnnnnnnnnnnnnnnnnnnnnnnnnnnnnnnnnnnnnnnnnnnnnnnnnnnnnnnnnnnnnnnnnnnnnnnnnnnnnnnnnnnnnnnnnnnnnnnnnnnnnnnnnnnnnnnnnnnnnnnnnnnnnnnnnnnnnnnnnnnnnnnnnnnnnnnnnnnnnnnnnnnnnnnnnnnnnnnnnnnnnnnnnnnnnnnnnnnnnnnnnnnnnnnnnnnnnnnnnnnnnnnnnnnnnnnnnnnnnnnnnnnnnnnnnnnnnnnnnnnnnnnnnnnnnnnnnnnnnnnnnnnnnnnnnnnnnnnnnnnnnnnnnnnnnnnnnnnnnnnnnnnnnnnnnnnnnnnnnnnnnnnnnnnnnnnnnnnnnnnnnnnnnnnnnnnnnnnnnnnnnnnnnnnnnnnnnnnnnnnnnnnnnnnnnnnnnnnnnnnnnnnnnnnnnnnnnnnnnnnnnnnnnnnnnnnnnnnnnnnnnnnnnnnnnnnnnnnnnnnnnnnnnnnnnnnnnnnnnnnnnnnnnnnnnnnnnnnnnnnnnnnnnnnnnnnnnnnnnnnnnnnnnnnnnnnnnnnnnnnnnnnnnnnnnnnnnnnnnnnnnnnnnnnnnnnnnnnnnnnnnnnnnnnnnnnnnnnnnnnnnnnnnnnnnnnnnnnnnnnnnnnnnnnnnnnnnnnnnnnnnnnnnnnnnnnnnnnnnnnnnnnnnnnnnnnnnnnnnnnnnnnnnnnnnnnnnnnnnnnnnnnnnnnnnnnnnnnnnnnnnnnnnnnnnnnnnnnnnnnnnnnnnnnnnnnnnnnnnnnnnnnnnnnnnnnnnnnnnnnnnnnnnnnnnnnnnnnnnnnnnnnnnnnnnnnnnnnnnnnnnnnnnnnnnnnnnnnnnnnnnnnnnnnnnnnnnnnnnnnnnnnnnnnnnnnnnnnnnnnnnnnnnnnnnnnnnnnnnnnnnnnnnnnnnnnnnnnnnnnnnnnnnnnnnnnnnnnnnnnnnnnnnnnnnnnnnnnnnnnnnnnnnnnnnnnnnnnnnnnnnnnnnnnnnnnnnnnnnnnnnnnnnnnnnnnnnnnnnnnnnnnnnnnnnnnnnnnnnnnnnnnnnnnnnnnnnnnnnnnnnnnnnnnnnnnnnnnnnnnnnnnnnnnnnnnnnnnnnnnnnnnnnnnnnnnnnnnnnnnnnnnnnnnnnnnnnnnnnnnnnnnnnnnnnnnnnnnnnnnnnnnnnnnnnnnnnnnnnnnnnnnnnnnnnnnnnnnnnnnnnnnnnnnnnnnnnnnnnnnnnnnnnnnnnnnnnnnnnnnnnnnnnnnnnnnnnnnnnnnnnnnnnnnnnnnnnnnnnnnnnnnnnnnnnnnnnnnnnnnnnnnnnnnnnnnnnnnnnnnnnnnnnnnnnnnnnnnnnnnnnnnnnnnnnnnnnnnnnnnnnnnnnnnnnnnnnnnnnnnnnnnnnnnnnnnnnnnnnnnnnnnnnnnnnnnnnnnnnnnnnnnnnnnnnnnnnnnnnnnnnnnnnnnnnnnnnnnnnnnnnnnnnnnnnnnnnnnnnnnnnnnnnnnnnnnnnnnnnnnnnnnnnnnnnnnnnnnnnnnnnnnnnnnnnnnnnnnnnnnnnnnnnnnnnnnnnnnnnnnnnnnnnnnnnnnnnnnnnnnnnnnnnnnnnnnnnnnnnnnnnnnnnnnnnnnnnnnnnnnnnnnnnnnnnnnnnnnnnnnnnnnnnnnnnnnnnnnnnnnnnnnnnnnnnnnnnnnnnnnnnnnnnnnnnnnnnnnnnnnnnnnnnnnnnnnnnnnnnnnnnnnnnnnnnnnnnnnnnnnnnnnnnnnnnnnnnnnnnnnnnnnnnnnnnnnnnnnnnnnnnnnnnnnnnnnnnnnnnnnnnnnnnnnnnnnnnnnnnnnnnnnnnnnnnnnnnnnnnnnnnnnnnnnnnnnnnnnnnnnnnnnnnnnnnnnnnnnnnnnnnnnnnnnnnnnnnnnnnnnnnnnnnnnnnnnnnnnnnnnnnnnnnnnnnnnnnnnnnnnnnnnnnnnnnnnnnnnnnnnnnnnnnnnnnnnnnnnnnnnnnnnnnnnnnnnnnnnnnnnnnnnnnnnnnnnnnnnnnnnnnnnnnnnnnnnnnnnnnnnnnnnnnnnnnnnnnnnnnnnnnnnnnnnnnnnnnnnnnnnnnnnnnnnnnnnnnnnnnnnnnnnnnnnnnnnnnnnnnnnnnnnnnnnnnnnnnnnnnnnnnnnnnnnnnnnnnnnnnnnnnnnnnnnnnnnnnnnnnnnnnnnnnnnnnnnnnnnnnnnnnnnnnnnnnnnnnnnnnnnnnnnnnnnnnnnnnnnnnnnnnnnnnnnnnnnnnnnnnnnnnnnnnnnnnnnnnnnnnnnnnnnnnnnnnnnnnnnnnnnnnnnnnnnnnnnnnnnnnnnnnnnnnnnnnnnnnnnnnnnnnnnnnnnnnnnnnnnnnnnnnnnnnnnnnnnnnnnnnnnnnnnnnnnnnnnnnnnnnnnnnnnnnnnnnnnnnnnnnnnnnnnnnnnnnnnnnnnnnnnnnnnnnnnnnnnnnnnnnnnnnnnnnnnnnnnnnnnnnnnnnnnnnnnnnnnnnnnnnnnnnnnnnnnnnnnnnnnnnnnnnnnnnnnnnnnnnnnnnnnnnnnnnnnnnnnnnnnnnnnnnnnnnnnnnnnnnnnnnnnnnnnnnnnnnnnnnnnnnnnnnnnnnnnnnnnnnnnnnnnnnnnnnnnnnnnnnnnnnnnnnnnnnnnnnnnnnnnnnnnnnnnnnnnnnnnnnnnnnnnnnnnnnnnnnnnnnnnnnnnnnnnnnnnnnnnnnnnnnnnnnnnnnnnnnnnnnnnnnnnnnnnnnnnnnnnnnnnnnnnnnnnnnnnnnnnnnnnnnnnnnnnnnnnnnnnnnnnnnnnnnnnnnnnnnnnnnnnnnnnnnnnnnnnnnnnnnnnnnnnnnnnnnnnnnnnnnnnnnnnnnnnnnnnnnnnnnnnnnnnnnnnnnnnnnnnnnnnnnnnnnnnnnnnnnnnnnnnnnnnnnnnnnnnnnnnnnnnnnnnnnnnnnnnnnnnnnnnnnnnnnnnnnnnnnnnnnnnnnnnnnnnnnnnnnnnnnnnnnnnnnnnnnnnnnnnnnnnnnnnnnnnnnnnnnnnnnnnnnnnnnnnnnnnnnnnnnnnnnnnnnnnnnnnnnnnnnnnnnnnnnnnnnnnnnnnnnnnnnnnnnnnnnnnnnnnnnnnnnnnnnnnnnnnnnnnnnnnnnnnnnnnnnnnnnnnnnnnnnnnnnnnnnnnnnnnnnnnnnnnnnnnnnnnnnnnnnnnnnnnnnnnnnnnnnnnnnnnnnnnnnnnnnnnnnnnnnnnnnnnnnnnnnnnnnnnnnnnnnnnnnnnnnnnnnnnnnnnnnnnnnnnnnnnnnnnnnnnnnnnnnnnnnnnnnnnnnnnnnnnnnnnnnnnnnnnnnnnnnnnnnnnnnnnnnnnnnnnnnnnnnnnnnnnnnnnnnnnnnnnnnnnnnnnnnnnnnnnnnnnnnnnnnnnnnnnnnnnnnnnnnnnnnnnnnnnnnnnnnnnnnnnnnnnnnnnnnnnnnnnnnnnnnnnnnnnnnnnnnnnnnnnnnnnnnnnnnnnnnnnnnnnnnnnnnnnnnnnnnnnnnnnnnnnnnnnnnnnnnnnnnnnnnnnnnnnnnnnnnnnnnnnnnnnnnnnnnnnnnnnnnnnnnnnnnnnnnnnnnnnnnnnnnnnnnnnnnnnnnnnnnnnnnnnnnnnnnnnnnnnnnnnnnnnnnnnnnnnnnnnnnnnnnnnnnnnnnnnnnnnnnnnnnnnnnnnnnnnnnnnnnnnnnnnnnnnnnnnnnnnnnnnnnnnnnnnnnnnnnnnnnnnnnnnnnnnnnnnnnnnnnnnnnnnnnnnnnnnnnnnnnnnnnnnnnnnnnnnnnnnnnnnnnnnnnnnnnnnnnnnnnnnnnnnnnnnnnnnnnnnnnnnnnnnnnnnnnnnnnnnnnnnnnnnnnnnnnnnnnnnnnnnnnnnnnnnnnnnnnnnnnnnnnnnnnnnnnnnnnnnnnnnnnnnnnnnnnnnnnnnnnnnnnnnnnnnnnnnnnnnnnnnnnnnnnnnnnnnnnnnnnnnnnnnnnnnnnnnnnnnnnnnnnnnnnnnnnnnnnnnnnnnnnnnnnnnnnnnnnnnnnnnnnnnnnnnnnnnnnnnnnnnnnnnnnnnnnnnnnnnnnnnnnnnnnnnnnnnnnnnnnnnnnnnnnnnnnnnnnnnnnnnnnnnnnnnnnnnnnnnnnnnnnnnnnnnnnnnnnnnnnnnnnnnnnnnnnnnnnnnnnnnnnnnnnnnnnnnnnnnnnnnnnnnnnnnnnnnnnnnnnnnnnnnnnnnnnnnnnnnnnnnnnnnnnnnnnnnnnnnnnnnnnnnnnnnnnnnnnnnnnnnnnnnnnnnnnnnnnnnnnnnnnnnnnnnnnnnnnnnnnnnnnnnnnnnnnnnnnnnnnnnnnnnnnnnnnnnnnnnnnnnnnnnnnnnnnnnnnnnnnnnnnnnnnnnnnnnnnnnnnnnnnnnnnnnnnnnnnnnnnnnnnnnnnnnnnnnnnnnnnnnnnnnnnnnnnnnnnnnnnnnnnnnnnnnnnnnnnnnnnnnnnnnnnnnnnnnnnnnnnnnnnnnnnnnnnnnnnnnnnnnnnnnnnnnnnnnnnnnnnnnnnnnnnnnnnnnnnnnnnnnnnnnnnnnnnnnnnnnnnnnnnnnnnnnnnnnnnnnnnnnnnnnnnnnnnnnnnnnnnnnnnnnnnnnnnnnnnnnnnnnnnnnnnnnnnnnnnnnnnnnnnnnnnnnnnnnnnnnnnnnnnnnnnnnnnnnnnnnnnnnnnnnnnnnnnnnnnnnnnnnnnnnnnnnnnnnnnnnnnnnnnnnnnnnnnnnnnnnnnnnnnnnnnnnnnnnnnnnnnnnnnnnnnnnnnnnnnnnnnnnnnnnnnnnnnnnnnnnnnnnnnnnnnnnnnnnnnnnnnnnnnnnnnnnnnnnnnnnnnnnnnnnnnnnnnnnnnnnnnnnnnnnnnnnnnnnnnnnnnnnnnnnnnnnnnnnnnnnnnnnnnnnnnnnnnnnnnnnnnnnnnnnnnnnnnnnnnnnnnnnnnnnnnnnnnnnnnnnnnnnnnnnnnnnnnnnnnnnnnnnnnnnnnnnnnnnnnnnnnnnnnnnnnnnnnnnnnnnnnnnnnnnnnnnnnnnnnnnnnnnnnnnnnnnnnnnnnnnnnnnnnnnnnnnnnnnnnnnnnnnnnnnnnnnnnnnnnnnnnnnnnnnnnnnnnnnnnnnnnnnnnnnnnnnnnnnnnnnnnnnnnnnnnnnnnnnnnnnnnnnnnnnnnnnnnnnnnnnnnnnnnnnnnnnnnnnnnnnnnnnnnnnnnnnnnnnnnnnnnnnnnnnnnnnnnnnnnnnnnnnnnnnnnnnnnnnnnnnnnnnnnnnnnnnnnnnnnnnnnnnnnnnnnnnnnnnnnnnnnnnnnnnnnnnnnnnnnnnnnnnnnnnnnnnnnnnnnnnnnnnnnnnnnnnnnnnnnnnnnnnnnnnnnnnnnnnnnnnnnnnnnnnnnnnnnnnnnnnnnnnnnnnnnnnnnnnnnnnnnnnnnnnnnnnnnnnnnnnnnnnnnnnnnnnnnnnnnnnnnnnnnnnnnnnnnnnnnnnnnnnnnnnnnnnnnnnnnnnnnnnnnnnnnnnnnnnnnnnnnnnnnnnnnnnnnnnnnnnnnnnnnnnnnnnnnnnnnnnnnnnnnnnnnnnnnnnnnnnnnnnnnnnnnnnnnnnnnnnnnnnnnnnnnnnnnnnnnnnnnnnnnnnnnnnnnnnnnnnnnnnnnnnnnnnnnnnnnnnnnnnnnnnnnnnnnnnnnnnnnnnnnnnnnnnnnnnnnnnnnnnnnnnnnnnnnnnnnnnnnnnnnnnnnnnnnnnnnnnnnnnnnnnnnnnnnnnnnnnnnnnnnnnnnnnnnnnnnnnnnnnnnnnnnnnnnnnnnnnnnnnnnnnnnnnnnnnnnnnnnnnnnnnnnnnnnnnnnnnnnnnnnnnnnnnnnnnnnnnnnnnnnnnnnnnnnnnnnnnnnnnnnnnnnnnnnnnnnnnnnnnnnnnnnnnnnnnnnnnnnnnnnnnnnnnnnnnnnnnnnnnnnnnnnnnnnnnnnnnnnnnnnnnnnnnnnnnnnnnnnnnnnnnnnnnnnnnnnnnnnnnnnnnnnnnnnnnnnnnnnnnnnnnnnnnnnnnnnnnnnnnnnnnnnnnnnnnnnnnnnnnnnnnnnnnnnnnnnnnnnnnnnnnnnnnnnnnnnnnnnnnnnnnnnnnnnnnnnnnnnnnnnnnnnnnnnnnnnnnnnnnnnnnnnnnnnnnnnnnnnnnnnnnnnnnnnnnnnnnnnnnnnnnnnnnnnnnnnnnnnnnnnnnnnnnnnnnnnnnnnnnnnnnnnnnnnnnnnnnnnnnnnnnnnnnnnnnnnnnnnnnnnnnnnnnnnnnnnnnnnnnnnnnnnnnnnnnnnnnnnnnnnnnnnnnnnnnnnnnnnnnnnnnnnnnnnnnnnnnnnnnnnnnnnnnnnnnnnnnnnnnnnnnnnnnnnnnnnnnnnnnnnnnnnnnnnnnnnnnnnnnnnnnnnnnnnnnnnnnnnnnnnnnnnnnnnnnnnnnnnnnnnnnnnnnnnnnnnnnnnnnnnnnnnnnnnnnnnnnnnnnnnnnnnnnnnnnnnnnnnnnnnnnnnnnnnnnnnnnnnnnnnnnnnnnnnnnnnnnnnnnnnnnnnnnnnnnnnnnnnnnnnnnnnnnnnnnnnnnnnnnnnnnnnnnnnnnnnnnnnnnnnnnnnnnnnnnnnnnnnnnnnnnnnnnnnnnnnnnnnnnnnnnnnnnnnnnnnnnnnnnnnnnnnnnnnnnnnnnnnnnnnnnnnnnnnnnnnnnnnnnnnnnnnnnnnnnnnnnnnnnnnnnnnnnnnnnnnnnnnnnnnnnnnnnnnnnnnnnnnnnnnnnnnnnnnnnnnnnnnnnnnnnnnnnnnnnnnnnnnnnnnnnnnnnnnnnnnnnnnnnnnnnnnnnnnnnnnnnnnnnnnnnnnnnnnnnnnnnnnnnnnnnnnnnnnnnnnnnnnnnnnnnnnnnnnnnnnnnnnnnnnnnnnnnnnnnnnnnnnnnnnnnnnnnnnnnnnnnnnnnnnnnnnnnnnnnnnnnnnnnnnnnnnnnnnnnnnnnnnnnnnnnnnnnnnnnnnnnnnnnnnnnnnnnnnnnnnnnnnnnnnnnnnnnnnnnnnnnnnnnnnnnnnnnnnnnnnnnnnnnnnnnnnnnnnnnnnnnnnnnnnnnnnnnnnnnnnnnnnnnnnnnnnnnnnnnnnnnnnnnnnnnnnnnnnnnnnnnnnnnnnnnnnnnnnnnnnnnnnnnnnnnnnnnnnnnnnnnnnnnnnnnnnnnnnnnnnnnnnnnnnnnnnnnnnnnnnnnnnnnnnnnnnnnnnnnnnnnnnnnnnnnnnnnnnnnnnnnnnnnnnnnnnnnnnnnnnnnnnnnnnnnnnnnnnnnnnnnnnnnnnnnnnnnnnnnnnnnnnnnnnnnnnnnnnnnnnnnnnnnnnnnnnnnnnnnnnnnnnnnnnnnnnnnnnnnnnnnnnnnnnnnnnnnnnnnnnnnnnnnnnnnnnnnnnnnnnnnnnnnnnnnnnnnnnnnnnnnnnnnnnnnnnnnnnnnnnnnnnnnnnnnnnnnnnnnnnnnnnnnnnnnnnnnnnnnnnnnnnnnnnnnnnnnnnnnnnnnnnnnnnnnnnnnnnnnnnnnnnnnnnnnnnnnnnnnnnnnnnnnnnnnnnnnnnnnnnnnnnnnnnnnnnnnnnnnnnnnnnnnnnnnnnnnnnnnnnnnnnnnnnnnnnnnnnnnnnnnnnnnnnnnnnnnnnnnnnnnnnnnnnnnnnnnnnnnnnnnnnnnnnnnnnnnnnnnnnnnnnnnnnnnnnnnnnnnnnnnnnnnnnnnnnnnnnnnnnnnnnnnnnnnnnnnnnnnnnnnnnnnnnnnnnnnnnnnnnnnnnnnnnnnnnnnnnnnnnnnnnnnnnnnnnnnnnnnnnnnnnnnnnnnnnnnnnnnnnnnnnnnnnnnnnnnnnnnnnnnnnnnnnnnnnnnnnnnnnnnnnnnnnnnnnnnnnnnnnnnnnnnnnnnnnnnnnnnnnnnnnnnnnnnnnnnnnnnnnnnnnnnnnnnnnnnnnnnnnnnnnnnnnnnnnnnnnnnnnnnnnnnnnnnnnnnnnnnnnnnnnnnnnnnnnnnnnnnnnnnnnnnnnnnnnnnnnnnnnnnnnnnnnnnnnnnnnnnnnnnnnnnnnnnnnnnnnnnnnnnnnnnnnnnnnnnnnnnnnnnnnnnnnnnnnnnnnnnnnnnnnnnnnnnnnnnnnnnnnnnnnnnnnnnnnnnnnnnnnnnnnnnnnnnnnnnnnnnnnnnnnnnnnnnnnnnnnnnnnnnnnnnnnnnnnnnnnnnnnnnnnnnnnnnnnnnnnnnnnnnnnnnnnnnnnnnnnnnnnnnnnnnnnnnnnnnnnnnnnnnnnnnnnnnnnnnnnnnnnnnnnnnnnnnnnnnnnnnnnnnnnnnnnnnnnnnnnnnnnnnnnnnnnnnnnnnnnnnnnnnnnnnnnnnnnnnnnnnnnnnnnnnnnnnnnnnnnnnnnnnnnnnnnnnnnnnnnnnnnnnnnnnnnnnnnnnnnnnnnnnnnnnnnnnnnnnnnnnnnnnnnnnnnnnnnnnnnnnnnnnnnnnnnnnnnnnnnnnnnnnnnnnnnnnnnnnnnnnnnnnnnnnnnnnnnnnnnnnnnnnnnnnnnnnnnnnnnnnnnnnnnnnnnnnnnnnnnnnnnnnnnnnnnnnnnnnnnnnnnnnnnnnnnnnnnnnnnnnnnnnnnnnnnnnnnnnnnnnnnnnnnnnnnnnnnnnnnnnnnnnnnnnnnnnnnnnnnnnnnnnnnnnnnnnnnnnnnnnnnnnnnnnnnnnnnnnnnnnnnnnnnnnnnnnnnnnnnnnnnnnnnnnnnnnnnnnnnnnnnnnnnnnnnnnnnnnnnnnnnnnnnnnnnnnnnnnnnnnnnnnnnnnnnnnnnnnnnnnnnnnnnnnnnnnnnnnnnnnnnnnnnnnnnnnnnnnnnnnnnnnnnnnnnnnnnnnnnnnnnnnnnnnnnnnnnnnnnnnnnnnnnnnnnnnnnnnnnnnnnnnnnnnnnnnnnnnnnnnnnnnnnnnnnnnnnnnnnnnnnnnnnnnnnnnnnnnnnnnnnnnnnnnnnnnnnnnnnnnnnnnnnnnnnnnnnnnnnnnnnnnnnnnnnnnnnnnnnnnnnnnnnnnnnnnnnnnnnnnnnnnnnnnnnnnnnnnnnnnnnnnnnnnnnnnnnnnnnnnnnnnnnnnnnnnnnnnnnnnnnnnnnnnnnnnnnnnnnnnnnnnnnnnnnnnnnnnnnnnnnnnnnnnnnnnnnnnnnnnnnnnnnnnnnnnnnnnnnnnnnnnnnnnnnnnnnnnnnnnnnnnnnnnnnnnnnnnnnnnnnnnnnnnnnnnnnnnnnnnnnnnnnnnnnnnnnnnnnnnnnnnnnnnnnnnnnnnnnnnnnnnnnnnnnnnnnnnnnnnnnnnnnnnnnnnnnnnnnnnnnnnnnnnnnnnnnnnnnnnnnnnnnnnnnnnnnnnnnnnnnnnnnnnnnnnnnnnnnnnnnnnnnnnnnnnnnnnnnnnnnnnnnnnnnnnnnnnnnnnnnnnnnnnnnnnnnnnnnnnnnnnnnnnnnnnnnnnnnnnnnnnnnnnnnnnnnnnnnnnnnnnnnnnnnnnnnnnnnnnnnnnnnnnnnnnnnnnnnnnnnnnnnnnnnnnnnnnnnnnnnnnnnnnnnnnnnnnnnnnnnnnnnnnnnnnnnnnnnnnnnnnnnnnnnnnnnnnnnnnnnnnnnnnnnnnnnnnnnnnnnnnnnnnnnnnnnnnnnnnnnnnnnnnnnnnnnnnnnnnnnnnnnnnnnnnnnnnnnnnnnnnnnnnnnnnnnnnnnnnnnnnnnnnnnnnnnnnnnnnnnnnnnnnnnnnnnnnnnnnnnnnnnnnnnnnnnnnnnnnnnnnnnnnnnnnnnnnnnnnnnnnnnnnnnnnnnnnnnnnnnnnnnnnnnnnnnnnnnnnnnnnnnnnnnnnnnnnnnnnnnnnnnnnnnnnnnnnnnnnnnnnnnnnnnnnnnnnnnnnnnnnnnnnnnnnnnnnnnnnnnnnnnnnnnnnnnnnnnnnnnnnnnnnnnnnnnnnnnnnnnnnnnnnnnnnnnnnnnnnnnnnnnnnnnnnnnnnnnnnnnnnnnnnnnnnnnnnnnnnnnnnnnnnnnnnnnnnnnnnnnnnnnnnnnnnnnnnnnnnnnnnnnnnnnnnnnnnnnnnnnnnnnnnnnnnnnnnnnnnnnnnnnnnnnnnnnnnnnnnnnnnnnnnnnnnnnnnnnnnnnnnnnnnnnnnnnnnnnnnnnnnnnnnnnnnnnnnnnnnnnnnnnnnnnnnnnnnnnnnnnnnnnnnnnnnnnnnnnnnnnnnnnnnnnnnnnnnnnnnnnnnnnnnnnnnnnnnnnnnnnnnnnnnnnnnnnnnnnnnnnnnnnnnnnnnnnnnnnnnnnnnnnnnnnnnnnnnnnnnnnnnnnnnnnnnnnnnnnnnnnnnnnnnnnnnnnnnnnnnnnnnnnnnnnnnnnnnnnnnnnnnnnnnnnnnnnnnnnnnnnnnnnnnnnnnnnnnnnnnnnnnnnnnnnnnnnnnnnnnnnnnnnnnnnnnnnnnnnnnnnnnnnnnnnnnnnnnnnnnnnnnnnnnnnnnnnnnnnnnnnnnnnnnnnnnnnnnnnnnnnnnnnnnnnnnnnnnnnnnnnnnnnnnnnnnnnnnnnnnnnnnnnnnnnnnnnnnnnnnnnnnnnnnnnnnnnnnnnnnnnnnnnnnnnnnnnnnnnnnnnnnnnnnnnnnnnnnnnnnnnnnnnnnnnnnnnnnnnnnnnnnnnnnnnnnnnnnnnnnnnnnnnnnnnnnnnnnnnnnnnnnnnnnnnnnnnnnnnnnnnnnnnnnnnnnnnnnnnnnnnnnnnnnnnnnnnnnnnnnnnnnnnnnnnnnnnnnnnnnnnnnnnnnnnnnnnnnnnnnnnnnnnnnnnnnnnnnnnnnnnnnnnnnnnnnnnnnnnnnnnnnnnnnnnnnnnnnnnnnnnnnnnnnnnnnnnnnnnnnnnnnnnnnnnnnnnnnnnnnnnnnnnnnnnnnnnnnnnnnnnnnnnnnnnnnnnnnnnnnnnnnnnnnnnnnnnnnnnnnnnnnnnnnnnnnnnnnnnnnnnnnnnnnnnnnnnnnnnnnnnnnnnnnnnnnnnnnnnnnnnnnnnnnnnnnnnnnnnnnnnnnnnnnnnnnnnnnnnnnnnnnnnnnnnnnnnnnnnnnnnnnnnnnnnnnnnnnnnnnnnnnnnnnnnnnnnnnnnnnnnnnnnnnnnnnnnnnnnnnnnnnnnnnnnnnnnnnnnnnnnnnnnnnnnnnnnnnnnnnnnnnnnnnnnnnnnnnnnnnnnnnnnnnnnnnnnnnnnnnnnnnnnnnnnnnnnnnnnnnnnnnnnnnnnnnnnnnnnnnnnnnnnnnnnnnnnnnnnnnnnnnnnnnnnnnnnnnnnnnnnnnnnnnnnnnnnnnnnnnnnnnnnnnnnnnnnnnnnnnnnnnnnnnnnnnnnnnnnnnnnnnnnnnnnnnnnnnnnnnnnnnnnnnnnnnnnnnnnnnnnnnnnnnnnnnnnnnnnnnnnnnnnnnnnnnnnnnnnnnnnnnnnnnnnnnnnnnnnnnnnnnnnnnnnnnnnnnnnnnnnnnnnnnnnnnnnnnnnnnnnnnnnnnnnnnnnnnnnnnnnnnnnnnnnnnnnnnnnnnnnnnnnnnnnnnnnnnnnnnnnnnnnnnnnnnnnnnnnnnnnnnnnnnnnnnnnnnnnnnnnnnnnnnnnnnnnnnnnnnnnnnnnnnnnnnnnnnnnnnnnnnnnnnnnnnnnnnnnnnnnnnnnnnnnnnnnnnnnnnnnnnnnnnnnnnnnnnnnnnnnnnnnnnnnnnnnnnnnnnnnnnnnnnnnnnnnnnnnnnnnnnnnnnnnnnnnnnnnnnnnnnnnnnnnnnnnnnnnnnnnnnnnnnnnnnnnnnnnnnnnnnnnnnnnnnnnnnnnnnnnnnnnnnnnnnnnnnnnnnnnnnnnnnnnnnnnnnnnnnnnnnnnnnnnnnnnnnnnnnnnnnnnnnnnnnnnnnnnnnnnnnnnnnnnnnnnnnnnnnnnnnnnnnnnnnnnnnnnnnnnnnnnnnnnnnnnnnnnnnnnnnnnnnnnnnnnnnnnnnnnnnnnnnnnnnnnnnnnnnnnnnnnnnnnnnnnnnnnnnnnnnnnnnnnnnnnnnnnnnnnnnnnnnnnnnnnnnnnnnnnnnnnnnnnnnnnnnnnnnnnnnnnnnnnnnnnnnnnnnnnnnnnnnnnnnnnnnnnnnnnnnnnnnnnnnnnnnnnnnnnnnnnnnnnnnnnnnnnnnnnnnnnnnnnnnnnnnnnnnnnnnnnnnnnnnnnnnnnnnnnnnnnnnnnnnnnnnnnnnnnnnnnnnnnnnnnnnnnnnnnnnnnnnnnnnnnnnnnnnnnnnnnnnnnnnnnnnnnnnnnnnnnnnnnnnnnnnnnnnnnnnnnnnnnnnnnnnnnnnnnnnnnnnnnnnnnnnnnnnnnnnnnnnnnnnnnnnnnnnnnnnnnnnnnnnnnnnnnnnnnnnnnnnnnnnnnnnnnnnnnnnnnnnnnnnnnnnnnnnnnnnnnnnnnnnnnnnnnnnnnnnnnnnnnnnnnnnnnnnnnnnnnnnnnnnnnnnnnnnnnnnnnnnnnnnnnnnnnnnnnnnnnnnnnnnnnnnnnnnnnnnnnnnnnnnnnnnnnnnnnnnnnnnnnnnnnnnnnnnnnnnnnnnnnnnnnnnnnnnnnnnnnnnnnnnnnnnnnnnnnnnnnnnnnnnnnnnnnnnnnnnnnnnnnnnnnnnnnnnnnnnnnnnnnnnnnnnnnnnnnnnnnnnnnnnnnnnnnnnnnnnnnnnnnnnnnnnnnnnnnnnnnnnnnnnnnnnnnnnnnnnnnnnnnnnnnnnnnnnnnnnnnnnnnnnnnnnnnnnnnnnnnnnnnnnnnnnnnnnnnnnnnnnnnnnnnnnnnnnnnnnnnnnnnnnnnnnnnnnnnnnnnnnnnnnnnnnnnnnnnnnnnnnnnnnnnnnnnnnnnnnnnnnnnnnnnnnnnnnnnnnnnnnnnnnnnnnnnnnnnnnnnnnnnnnnnnnnnnnnnnnnnnnnnnnnnnnnnnnnnnnnnnnnnnnnnnnnnnnnnnnnnnnnnnnnnnnnnnnnnnnnnnnnnnnnnnnnnnnnnnnnnnnnnnnnnnnnnnnnnnnnnnnnnnnnnnnnnnnnnnnnnnnnnnnnnnnnnnnnnnnnnnnnnnnnnnnnnnnnnnnnnnnnnnnnnnnnnnnnnnnnnnnnnnnnnnnnnnnnnnnnnnnnnnnnnnnnnnnnnnnnnnnnnnnnnnnnnnnnnnnnnnnnnnnnnnnnnnnnnnnnnnnnnnnnnnnnnnnnnnnnnnnnnnnnnnnnnnnnnnnnnnnnnnnnnnnnnnnnnnnnnnnnnnnnnnnnnnnnnnnnnnnnnnnnnnnnnnnnnnnnnnnnnnnnnnnnnnnnnnnnnnnnnnnnnnnnnnnnnnnnnnnnnnnnnnnnnnnnnnnnnnnnnnnnnnnnnnnnnnnnnnnnnnnnnnnnnnnnnnnnnnnnnnnnnnnnnnnnnnnnnnnnnnnnnnnnnnnnnnnnnnnnnnnnnnnnnnnnnnnnnnnnnnnnnnnnnnnnnnnnnnnnnnnnnnnnnnnnnnnnnnnnnnnnnnnnnnnnnnnnnnnnnnnnnnnnnnnnnnnnnnnnnnnnnnnnnnnnnnnnnnnnnnnnnnnnnnnnnnnnnnnnnnnnnnnnnnnnnnnnnnnnnnnnnnnnnnnnnnnnnnnnnnnnnnnnnnnnnnnnnnnnnnnnnnnnnnnnnnnnnnnnnnnnnnnnnnnnnnnnnnnnnnnnnnnnnnnnnnnnnnnnnnnnnnnnnnnnnnnnnnnnnnnnnnnnnnnnnnnnnnnnnnnnnnnnnnnnnnnnnnnnnnnnnnnnnnnnnnnnnnnnnnnnnnnnnnnnnnnnnnnnnnnnnnnnnnnnnnnnnnnnnnnnnnnnnnnnnnnnnnnnnnnnnnnnnnnnnnnnnnnnnnnnnnnnnnnnnnnnnnnnnnnnnnnnnnnnnnnnnnnnnnnnnnnnnnnnnnnnnnnnnnnnnnnnnnnnnnnnnnnnnnnnnnnnnnnnnnnnnnnnnnnnnnnnnnnnnnnnnnnnnnnnnnnnnnnnnnnnnnnnnnnnnnnnnnnnnnnnnnnnnnnnnnnnnnnnnnnnnnnnnnnnnnnnnnnnnnnnnnnnnnnnnnnnnnnnnnnnnnnnnnnnnnnnnnnnnnnnnnnnnnnnnnnnnnnnnnnnnnnnnnnnnnnnnnnnnnnnnnnnnnnnnnnnnnnnnnnnnnnnnnnnnnnnnnnnnnnnnnnnnnnnnnnnnnnnnnnnnnnnnnnnnnnnnnnnnnnnnnnnnnnnnnnnnnnnnnnnnnnnnnnnnnnnnnnnnnnnnnnnnnnnnnnnnnnnnnnnnnnnnnnnnnnnnnnnnnnnnnnnnnnnnnnnnnnnnnnnnnnnnnnnnnnnnnnnnnnnnnnnnnnnnnnnnnnnnnnnnnnnnnnnnnnnnnnnnnnnnnnnnnnnnnnnnnnnnnnnnnnnnnnnnnnnnnnnnnnnnnnnnnnnnnnnnnnnnnnnnnnnnnnnnnnnnnnnnnnnnnnnnnnnnnnnnnnnnnnnnnnnnnnnnnnnnnnnnnnnnnnnnnnnnnnnnnnnnnnnnnnnnnnnnnnnnnnnnnnnnnnnnnnnnnnnnnnnnnnnnnnnnnnnnnnnnnnnnnnnnnnnnnnnnnnnnnnnnnnnnnnnnnnnnnnnnnnnnnnnnnnnnnnnnnnnnnnnnnnnnnnnnnnnnnnnnnnnnnnnnnnnnnnnnnnnnnnnnnnnnnnnnnnnnnnnnnnnnnnnnnnnnnnnnnnnnnnnnnnnnnnnnnnnnnnnnnnnnnnnnnnnnnnnnnnnnnnnnnnnnnnnnnnnnnnnnnnnnnnnnnnnnnnnnnnnnnnnnnnnnnnnnnnnnnnnnnnnnnnnnnnnnnnnnnnnnnnnnnnnnnnnnnnnnnnnnnnnnnnnnnnnnnnnnnnnnnnnnnnnnnnnnnnnnnnnnnnnnnnnnnnnnnnnnnnnnnnnnnnnnnnnnnnnnnnnnnnnnnnnnnnnnnnnnnnnnnnnnnnnnnnnnnnnnnnnnnnnnnnnnnnnnnnnnnnnnnnnnnnnnnnnnnnnnnnnnnnnnnnnnnnnnnnnnnnnnnnnnnnnnnnnnnnnnnnnnnnnnnnnnnnnnnnnnnnnnnnnnnnnnnnnnnnnnnnnnnnnnnnnnnnnnnnnnnnnnnnnnnnnnnnnnnnnnnnnnnnnnnnnnnnnnnnnnnnnnnnnnnnnnnnnnnnnnnnnnnnnnnnnnnnnnnnnnnnnnnnnnnnnnnnnnnnnnnnnnnnnnnnnnnnnnnnnnnnnnnnnnnnnnnnnnnnnnnnnnnnnnnnnnnnnnnnnnnnnnnnnnnnnnnnnnnnnnnnnnnnnnnnnnnnnnnnnnnnnnnnnnnnnnnnnnnnnnnnnnnnnnnnnnnnnnnnnnnnnnnnnnnnnnnnnnnnnnnnnnnnnnnnnnnnnnnnnnnnnnnnnnnnnnnnnnnnnnnnnnnnnnnnnnnnnnnnnnnnnnnnnnnnnnnnnnnnnnnnnnnnnnnnnnnnnnnnnnnnnnnnnnnnnnnnnnnnnnnnnnnnnnnnnnnnnnnnnnnnnnnnnnnnnnnnnnnnnnnnnnnnnnnnnnnnnnnnnnnnnnnnnnnnnnnnnnnnnnnnnnnnnnnnnnnnnnnnnnnnnnnnnnnnnnnnnnnnnnnnnnnnnnnnnnnnnnnnnnnnnnnnnnnnnnnnnnnnnnnnnnnnnnnnnnnnnnnnnnnnnnnnnnnnnnnnnnnnnnnnnnnnnnnnnnnnnnnnnnnnnnnnnnnnnnnnnnnnnnnnnnnnnnnnnnnnnnnnnnnnnnnnnnnnnnnnnnnnnnnnnnnnnnnnnnnnnnnnnnnnnnnnnnnnnnnnnnnnnnnnnnnnnnnnnnnnnnnnnnnnnnnnnnnnnnnnnnnnnnnnnnnnnnnnnnnnnnnnnnnnnnnnnnnnnnnnnnnnnnnnnnnnnnnnnnnnnnnnnnnnnnnnnnnnnnnnnnnnnnnnnnnnnnnnnnnnnnnnnnnnnnnnnnnnnnnnnnnnnnnnnnnnnnnnnnnnnnnnnnnnnnnnnnnnnnnnnnnnnnnnnnnnnnnnnnnnnnnnnnnnnnnnnnnnnnnnnnnnnnnnnnnnnnnnnnnnnnnnnnnnnnnnnnnnnnnnnnnnnnnnnnnnnnnnnnnnnnnnnnnnnnnnnnnnnnnnnnnnnnnnnnnnnnnnnnnnnnnnnnnnnnnnnnnnnnnnnnnnnnnnnnnnnnnnnnnnnnnnnnnnnnnnnnnnnnnnnnnnnnnnnnnnnnnnnnnnnnnnnnnnnnnnnnnnnnnnnnnnnnnnnnnnnnnnnnnnnnnnnnnnnnnnnnnnnnnnnnnnnnnnnnnnnnnnnnnnnnnnnnnnnnnnnnnnnnnnnnnnnnnnnnnnnnnnnnnnnnnnnnnnnnnnnnnnnnnnnnnnnnnnnnnnnnnnnnnnnnnnnnnnnnnnnnnnnnnnnnnnnnnnnnnnnnnnnnnnnnnnnnnnnnnnnnnnnnnnnnnnnnnnnnnnnnnnnnnnnnnnnnnnnnnnnnnnnnnnnnnnnnnnnnnnnnnnnnnnnnnnnnnnnnnnnnnnnnnnnnnnnnnnnnnnnnnnnnnnnnnnnnnnnnnnnnnnnnnnnnnnnnnnnnnnnnnnnnnnnnnnnnnnnnnnnnnnnnnnnnnnnnnnnnnnnnnnnnnnnnnnnnnnnnnnnnnnnnnnnnnnnnnnnnnnnnnnnnnnnnnnnnnnnnnnnnnnnnnnnnnnnnnnnnnnnnnnnnnnnnnnnnnnnnnnnnnnnnnnnnnnnnnnnnnnnnnnnnnnnnnnnnnnnnnnnnnnnnnnnnnnnnnnnnnnnnnnnnnnnnnnnnnnnnnnnnnnnnnnnnnnnnnnnnnnnnnnnnnnnnnnnnnnnnnnnnnnnnnnnnnnnnnnnnnnnnnnnnnnnnnnnnnnnnnnnnnnnnnnnnnnnnnnnnnnnnnnnnnnnnnnnnnnnnnnnnnnnnnnnnnnnnnnnnnnnnnnnnnnnnnnnnnnnnnnnnnnnnnnnnnnnnnnnnnnnnnnnnnnnnnnnnnnnnnnnnnnnnnnnnnnnnnnnnnnnnnnnnnnnnnnnnnnnnnnnnnnnnnnnnnnnnnnnnnnnnnnnnnnnnnnnnnnnnnnnnnnnnnnnnnnnnnnnnnnnnnnnnnnnnnnnnnnnnnnnnnnnnnnnnnnnnnnnnnnnnnnnnnnnnnnnnnnnnnnnnnnnnnnnnnnnnnnnnnnnnnnnnnnnnnnnnnnnnnnnnnnnnnnnnnnnnnnnnnnnnnnnnnnnnnnnnnnnnnnnnnnnnnnnnnnnnnnnnnnnnnnnnnnnnnnnnnnnnnnnnnnnnnnnnnnnnnnnnnnnnnnnnnnnnnnnnnnnnnnnnnnnnnnnnnnnnnnnnnnnnnnnnnnnnnnnnnnnnnnnnnnnnnnnnnnnnnnnnnnnnnnnnnnnnnnnnnnnnnnnnnnnnnnnnnnnnnnnnnnnnnnnnnnnnnnnnnnnnnnnnnnnnnnnnnnnnnnnnnnnnnnnnnnnnnnnnnnnnnnnnnnnnnnnnnnnnnnnnnnnnnnnnnnnnnnnnnnnnnnnnnnnnnnnnnnnnnnnnnnnnnnnnnnnnnnnnnnnnnnnnnnnnnnnnnnnnnnnnnnnnnnnnnnnnnnnnnnnnnnnnnnnnnnnnnnnnnnnnnnnnnnnnnnnnnnnnnnnnnnnnnnnnnnnnnnnnnnnnnnnnnnnnnnnnnnnnnnnnnnnnnnnnnnnnnnnnnnnnnnnnnnnnnnnnnnnnnnnnnnnnnnnnnnnnnnnnnnnnnnnnnnnnnnnnnnnnnnnnnnnnnnnnnnnnnnnnnnnnnnnnnnnnnnnnnnnnnnnnnnnnnnnnnnnnnnnnnnnnnnnnnnnnnnnnnnnnnnnnnnnnnnnnnnnnnnnnnnnnnnnnnnnnnnnnnnnnnnnnnnnnnnnnnnnnnnnnnnnnnnnnnnnnnnnnnnnnnnnnnnnnnnnnnnnnnnnnnnnnnnnnnnnnnnnnnnnnnnnnnnnnnnnnnnnnnnnnnnnnnnnnnnnnnnnnnnnnnnnnnnnnnnnnnnnnnnnnnnnnnnnnnnnnnnnnnnnnnnnnnnnnnnnnnnnnnnnnnnnnnnnnnnnnnnnnnnnnnnnnnnnnnnnnnnnnnnnnnnnnnnnnnnnnnnnnnnnnnnnnnnnnnnnnnnnnnnnnnnnnnnnnnnnnnnnnnnnnnnnnnnnnnnnnnnnnnnnnnnnnnnnnnnnnnnnnnnnnnnnnnnnnnnnnnnnnnnnnnnnnnnnnnnnnnnnnnnnnnnnnnnnnnnnnnnnnnnnnnnnnnnnnnnnnnnnnnnnnnnnnnnnnnnnnnnnnnnnnnnnnnnnnnnnnnnnnnnnnnnnnnnnnnnnnnnnnnnnnnnnnnnnnnnnnnnnnnnnnnnnnnnnnnnnnnnnnnnnnnnnnnnnnnnnnnnnnnnnnnnnnnnnnnnnnnnnnnnnnnnnnnnnnnnnnnnnnnnnnnnnnnnnnnnnnnnnnnnnnnnnnnnnnnnnnnnnnnnnnnnnnnnnnnnnnnnnnnnnnnnnnnnnnnnnnnnnnnnnnnnnnnnnnnnnnnnnnnnnnnnnnnnnnnnnnnnnnnnnnnnnnnnnnnnnnnnnnnnnnnnnnnnnnnnnnnnnnnnnnnnnnnnnnnnnnnnnnnnnnnnnnnnnnnnnnnnnnnnnnnnnnnnnnnnnnnnnnnnnnnnnnnnnnnnnnnnnnnnnnnnnnnnnnnnnnnnnnnnnnnnnnnnnnnnnnnnnnnnnnnnnnnnnnnnnnnnnnnnnnnnnnnnnnnnnnnnnnnnnnnnnnnnnnnnnnnnnnnnnnnnnnnnnnnnnnnnnnnnnnnnnnnnnnnnnnnnnnnnnnnnnnnnnnnnnnnnnnnnnnnnnnnnnnnnnnnnnnnnnnnnnnnnnnnnnnnnnnnnnnnnnnnnnnnnnnnnnnnnnnnnnnnnnnnnnnnnnnnnnnnnnnnnnnnnnnnnnnnnnnnnnnnnnnnnnnnnnnnnnnnnnnnnnnnnnnnnnnnnnnnnnnnnnnnnnnnnnnnnnnnnnnnnnnnnnnnnnnnnnnnnnnnnnnnnnnnnnnnnnnnnnnnnnnnnnnnnnnnnnnnnnnnnnnnnnnnnnnnnnnnnnnnnnnnnnnnnnnnnnnnnnnnnnnnnnnnnnnnnnnnnnnnnnnnnnnnnnnnnnnnnnnnnnnnnnnnnnnnnnnnnnnnnnnnnnnnnnnnnnnnnnnnnnnnnnnnnnnnnnnnnnnnnnnnnnnnnnnnnnnnnnnnnnnnnnnnnnnnnnnnnnnnnnnnnnnnnnnnnnnnnnnnnnnnnnnnnnnnnnnnnnnnnnnnnnnnnnnnnnnnnnnnnnnnnnnnnnnnnnnnnnnnnnnnnnnnnnnnnnnnnnnnnnnnnnnnnnnnnnnnnnnnnnnnnnnnnnnnnnnnnnnnnnnnnnnnnnnnnnnnnnnnnnnnnnnnnnnnnnnnnnnnnnnnnnnnnnnnnnnnnnnnnnnnnnnnnnnnnnnnnnnnnnnnnnnnnnnnnnnnnnnnnnnnnnnnnnnnnnnnnnnnnnnnnnnnnnnnnnnnnnnnnnnnnnnnnnnnnnnnnnnnnnnnnnnnnnnnnnnnnnnnnnnnnnnnnnnnnnnnnnnnnnnnnnnnnnnnnnnnnnnnnnnnnnnnnnnnnnnnnnnnnnnnnnnnnnnnnnnnnnnnnnnnnnnnnnnnnnnnnnnnnnnnnnnnnnnnnnnnnnnnnnnnnnnnnnnnnnnnnnnnnnnnnnnnnnnnnnnnnnnnnnnnnnnnnnnnnnnnnnnnnnnnnnnnnnnnnnnnnnnnnnnnnnnnnnnnnnnnnnnnnnnnnnnnnnnnnnnnnnnnnnnnnnnnnnnnnnnnnnnnnnnnnnnnnnnnnnnnnnnnnnnnnnnnnnnnnnnnnnnnnnnnnnnnnnnnnnnnnnnnnnnnnnnnnnnnnnnnnnnnnnnnnnnnnnnnnnnnnnnnnnnnnnnnnnnnnnnnnnnnnnnnnnnnnnnnnnnnnnnnnnnnnnnnnnnnnnnnnnnnnnnnnnnnnnnnnnnnnnnnnnnnnnnnnnnnnnnnnnnnnnnnnnnnnnnnnnnnnnnnnnnnnnnnnnnnnnnnnnnnnnnnnnnnnnnnnnnnnnnnnnnnnnnnnnnnnnnnnnnnnnnnnnnnnnnnnnnnnnnnnnnnnnnnnnnnnnnnnnnnnnnnnnnnnnnnnnnnnnnnnnnnnnnnnnnnnnnnnnnnnnnnnnnnnnnnnnnnnnnnnnnnnnnnnnnnnnnnnnnnnnnnnnnnnnnnnnnnnnnnnnnnnnnnnnnnnnnnnnnnnnnnnnnnnnnnnnnnnnnnnnnnnnnnnnnnnnnnnnnnnnnnnnnnnnnnnnnnnnnnnnnnnnnnnnnnnnnnnnnnnnnnnnnnnnnnnnnnnnnnnnnnnnnnnnnnnnnnnnnnnnnnnnnnnnnnnnnnnnnnnnnnnnnnnnnnnnnnnnnnnnnnnnnnnnnnnnnnnnnnnnnnnnnnnnnnnnnnnnnnnnnnnnnnnnnnnnnnnnnnnnnnnnnnnnnnnnnnnnnnnnnnnnnnnnnnnnnnnnnnnnnnnnnnnnnnnnnnnnnnnnnnnnnnnnnnnnnnnnnnnnnnnnnnnnnnnnnnnnnnnnnnnnnnnnnnnnnnnnnnnnnnnnnnnnnnnnnnnnnnnnnnnnnnnnnnnnnnnnnnnnnnnnnnnnnnnnnnnnnnnnnnnnnnnnnnnnnnnnnnnnnnnnnnnnnnnnnnnnnnnnnnnnnnnnnnnnnnnnnnnnnnnnnnnnnnnnnnnnnnnnnnnnnnnnnnnnnnnnnnnnnnnnnnnnnnnnnnnnnnnnnnnnnnnnnnnnnnnnnnnnnnnnnnnnnnnnnnnnnnnnnnnnnnnnnnnnnnnnnnnnnnnnnnnnnnnnnnnnnnnnnnnnnnnnnnnnnnnnnnnnnnnnnnnnnnnnnnnnnnnnnnnnnnnnnnnnnnnnnnnnnnnnnnnnnnnnnnnnnnnnnnnnnnnnnnnnnnnnnnnnnnnnnnnnnnnnnnnnnnnnnnnnnnnnnnnnnnnnnnnnnnnnnnnnnnnnnnnnnnnnnnnnnnnnnnnnnnnnnnnnnnnnnnnnnnnnnnnnnnnnnnnnnnnnnnnnnnnnnnnnnnnnnnnnnnnnnnnnnnnnnnnnnnnnnnnnnnnnnnnnnnnnnnnnnnnnnnnnnnnnnnnnnnnnnnnnnnnnnnnnnnnnnnnnnnnnnnnnnnnnnnnnnnnnnnnnnnnnnnnnnnnnnnnnnnnnnnnnnnnnnnnnnnnnnnnnnnnnnnnnnnnnnnnnnnnnnnnnnnnnnnnnnnnnnnnnnnnnnnnnnnnnnnnnnnnnnnnnnnnnnnnnnnnnnnnnnnnnnnnnnnnnnnnnnnnnnnnnnnnnnnnnnnnnnnnnnnnnnnnnnnnnnnnnnnnnnnnnnnnnnnnnnnnnnnnnnnnnnnnnnnnnnnnnnnnnnnnnnnnnnnnnnnnnnnnnnnnnnnnnnnnnnnnnnnnnnnnnnnnnnnnnnnnnnnnnnnnnnnnnnnnnnnnnnnnnnnnnnnnnnnnnnnnnnnnnnnnnnnnnnnnnnnnnnnnnnnnnnnnnnnnnnnnnnnnnnnnnnnnnnnnnnnnnnnnnnnnnnnnnnnnnnnnnnnnnnnnnnnnnnnnnnnnnnnnnnnnnnnnnnnnnnnnnnnnnnnnnnnnnnnnnnnnnnnnnnnnnnnnnnnnnnnnnnnnnnnnnnnnnnnnnnnnnnnnnnnnnnnnnnnnnnnnnnnnnnnnnnnnnnnnnnnnnnnnnnnnnnnnnnnnnnnnnnnnnnnnnnnnnnnnnnnnnnnnnnnnnnnnnnnnnnnnnnnnnnnnnnnnnnnnnnnnnnnnnnnnnnnnnnnnnnnnnnnnnnnnnnnnnnnnnnnnnnnnnnnnnnnnnnnnnnnnnnnnnnnnnnnnnnnnnnnnnnnnnnnnnnnnnnnnnnnnnnnnnnnnnnnnnnnnnnnnnnnnnnnnnnnnnnnnnnnnnnnnnnnnnnnnnnnnnnnnnnnnnnnnnnnnnnnnnnnnnnnnnnnnnnnnnnnnnnnnnnnnnnnnnnnnnnnnnnnnnnnnnnnnnnnnnnnnnnnnnnnnnnnnnnnnnnnnnnnnnnnnnnnnnnnnnnnnnnnnnnnnnnnnnnnnnnnnnnnnnnnnnnnnnnnnnnnnnnnnnnnnnnnnnnnnnnnnnnnnnnnnnnnnnnnnnnnnnnnnnnnnnnnnnnnnnnnnnnnnnnnnnnnnnnnnnnnnnnnnnnnnnnnnnnnnnnnnnnnnnnnnnnnnnnnnnnnnnnnnnnnnnnnnnnnnnnnnnnnnnnnnnnnnnnnnnnnnnnnnnnnnnnnnnnnnnnnnnnnnnnnnnnnnnnnnnnnnnnnnnnnnnnnnnnnnnnnnnnnnnnnnnnnnnnnnnnnnnnnnnnnnnnnnnnnnnnnnnnnnnnnnnnnnnnnnnnnnnnnnnnnnnnnnnnnnnnnnnnnnnnnnnnnnnnnnnnnnnnnnnnnnnnnnnnnnnnnnnnnnnnnnnnnnnnnnnnnnnnnnnnnnnnnnnnnnnnnnnnnnnnnnnnnnnnnnnnnnnnnnnnnnnnnnnnnnnnnnnnnnnnnnnnnnnnnnnnnnnnnnnnnnnnnnnnnnnnnnnnnnnnnnnnnnnnnnnnnnnnnnnnnnnnnnnnnnnnnnnnnnnnnnnnnnnnnnnnnnnnnnnnnnnnnnnnnnnnnnnnnnnnnnnnnnnnnnnnnnnnnnnnnnnnnnnnnnnnnnnnnnnnnnnnnnnnnnnnnnnnnnnnnnnnnnnnnnnnnnnnnnnnnnnnnnnnnnnnnnnnnnnnnnnnnnnnnnnnnnnnnnnnnnnnnnnnnnnnnnnnnnnnnnnnnnnnnnnnnnnnnnnnnnnnnnnnnnnnnnnnnnnnnnnnnnnnnnnnnnnnnnnnnnnnnnnnnnnnnnnnnnnnnnnnnnnnnnnnnnnnnnnnnnnnnnnnnnnnnnnnnnnnnnnnnnnnnnnnnnnnnnnnnnnnnnnnnnnnnnnnnnnnnnnnnnnnnnnnnnnnnnnnnnnnnnnnnnnnnnnnnnnnnnnnnnnnnnnnnnnnnnnnnnnnnnnnnnnnnnnnnnnnnnnnnnnnnnnnnnnnnnnnnnnnnnnnnnnnnnnnnnnnnnnnnnnnnnnnnnnnnnnnnnnnnnnnnnnnnnnnnnnnnnnnnnnnnnnnnnnnnnnnnnnnnnnnnnnnnnnnnnnnnnnnnnnnnnnnnnnnnnnnnnnnnnnnnnnnnnnnnnnnnnnnnnnnnnnnnnnnnnnnnnnnnnnnnnnnnnnnnnnnnnnnnnnnnnnnnnnnnnnnnnnnnnnnnnnnnnnnnnnnnnnnnnnnnnnnnnnnnnnnnnnnnnnnnnnnnnnnnnnnnnnnnnnnnnnnnnnnnnnnnnnnnnnnnnnnnnnnnnnnnnnnnnnnnnnnnnnnnnnnnnnnnnnnnnnnnnnnnnnnnnnnnnnnnnnnnnnnnnnnnnnnnnnnnnnnnnnnnnnnnnnnnnnnnnnnnnnnnnnnnnnnnnnnnnnnnnnnnnnnnnnnnnnnnnnnnnnnnnnnnnnnnnnnnnnnnnnnnnnnnnnnnnnnnnnnnnnnnnnnnnnnnnnnnnnnnnnnnnnnnnnnnnnnnnnnnnnnnnnnnnnnnnnnnnnnnnnnnnnnnnnnnnnnnnnnnnnnnnnnnnnnnnnnnnnnnnnnnnnnnnnnnnnnnnnnnnnnnnnnnnnnnnnnnnnnnnnnnnnnnnnnnnnnnnnnnnnnnnnnnnnnnnnnnnnnnnnnnnnnnnnnnnnnnnnnnnnnnnnnnnnnnnnnnnnnnnnnnnnnnnnnnnnnnnnnnnnnnnnnnnnnnnnnnnnnnnnnnnnnnnnnnnnnnnnnnnnnnnnnnnnnnnnnnnnnnnnnnnnnnnnnnnnnnnnnnnnnnnnnnnnnnnnnnnnnnnnnnnnnnnnnnnnnnnnnnnnnnnnnnnnnnnnnnnnnnnnnnnnnnnnnnnnnnnnnnnnnnnnnnnnnnnnnnnnnnnnnnnnnnnnnnnnnnnnnnnnnnnnnnnnnnnnnnnnnnnnnnnnnnnnnnnnnnnnnnnnnnnnnnnnnnnnnnnnnnnnnnnnnnnnnnnnnnnnnnnnnnnnnnnnnnnnnnnnnnnnnnnnnnnnnnnnnnnnnnnnnnnnnnnnnnnnnnnnnnnnnnnnnnnnnnnnnnnnnnnnnnnnnnnnnnnnnnnnnnnnnnnnnnnnnnnnnnnnnnnnnnnnnnnnnnnnnnnnnnnnnnnnnnnnnnnnnnnnnnnnnnnnnnnnnnnnnnnnnnnnnnnnnnnnnnnnnnnnnnnnnnnnnnnnnnnnnnnnnnnnnnnnnnnnnnnnnnnnnnnnnnnnnnnnnnnnnnnnnnnnnnnnnnnnnnnnnnnnnnnnnnnnnnnnnnnnnnnnnnnnnnnnnnnnnnnnnnnnnnnnnnnnnnnnnnnnnnnnnnnnnnnnnnnnnnnnnnnnnnnnnnnnnnnnnnnnnnnnnnnnnnnnnnnnnnnnnnnnnnnnnnnnnnnnnnnnnnnnnnnnnnnnnnnnnnnnnnnnnnnnnnnnnnnnnnnnnnnnnnnnnnnnnnnnnnnnnnnnnnnnnnnnnnnnnnnnnnnnnnnnnnnnnnnnnnnnnnnnnnnnnnnnnnnnnnnnnnnnnnnnnnnnnnnnnnnnnnnnnnnnnnnnnnnnnnnnnnnnnnnnnnnnnnnnnnnnnnnnnnnnnnnnnnnnnnnnnnnnnnnnnnnnnnnnnnnnnnnnnnnnnnnnnnnnnnnnnnnnnnnnnnnnnnnnnnnnnnnnnnnnnnnnnnnnnnnnnnnnnnnnnnnnnnnnnnnnnnnnnnnnnnnnnnnnnnnnnnnnnnnnnnnnnnnnnnnnnnnnnnnnnnnnnnnnnnnnnnnnnnnnnnnnnnnnnnnnnnnnnnnnnnnnnnnnnnnnnnnnnnnnnnnnnnnnnnnnnnnnnnnnnnnnnnnnnnnnnnnnnnnnnnnnnnnnnnnnnnnnnnnnnnnnnnnnnnnnnnnnnnnnnnnnnnnnnnnnnnnnnnnnnnnnnnnnnnnnnnnnnnnnnnnnnnnnnnnnnnnnnnnnnnnnnnnnnnnnnnnnnnnnnnnnnnnnnnnnnnnnnnnnnnnnnnnnnnnnnnnnnnnnnnnnnnnnnnnnnnnnnnnnnnnnnnnnnnnnnnnnnnnnnnnnnnnnnnnnnnnnnnnnnnnnnnnnnnnnnnnnnnnnnnnnnnnnnnnnnnnnnnnnnnnnnnnnnnnnnnnnnnnnnnnnnnnnnnnnnnnnnnnnnnnnnnnnnnnnnnnnnnnnnnnnnnnnnnnnnnnnnnnnnnnnnnnnnnnnnnnnnnnnnnnnnnnnnnnnnnnnnnnnnnnnnnnnnnnnnnnnnnnnnnnnnnnnnnnnnnnnnnnnnnnnnnnnnnnnnnnnnnnnnnnnnnnnnnnnnnnnnnnnnnnnnnnnnnnnnnnnnnnnnnnnnnnnnnnnnnnnnnnnnnnnnnnnnnnnnnnnnnnnnnnnnnnnnnnnnnnnnnnnnnnnnnnnnnnnnnnnnnnnnnnnnnnnnnnnnnnnnnnnnnnnnnnnnnnnnnnnnnnnnnnnnnnnnnnnnnnnnnnnnnnnnnnnnnnnnnnnnnnnnnnnnnnnnnnnnnnnnnnnnnnnnnnnnnnnnnnnnnnnnnnnnnnnnnnnnnnnnnnnnnnnnnnnnnnnnnnnnnnnnnnnnnnnnnnnnnnnnnnnnnnnnnnnnnnnnnnnnnnnnnnnnnnnnnnnnnnnnnnnnnnnnnnnnnnnnnnnnnnnnnnnnnnnnnnnnnnnnnnnnnnnnnnnnnnnnnnnnnnnnnnnnnnnnnnnnnnnnnnnnnnnnnnnnnnnnnnnnnnnnnnnnnnnnnnnnnnnnnnnnnnnnnnnnnnnnnnnnnnnnnnnnnnnnnnnnnnnnnnnnnnnnnnnnnnnnnnnnnnnnnnnnnnnnnnnnnnnnnnnnnnnnnnnnnnnnnnnnnnnnnnnnnnnnnnnnnnnnnnnnnnnnnnnnnnnnnnnnnnnnnnnnnnnnnnnnnnnnnnnnnnnnnnnnnnnnnnnnnnnnnnnnnnnnnnnnnnnnnnnnnnnnnnnnnnnnnnnnnnnnnnnnnnnnnnnnnnnnnnnnnnnnnnnnnnnnnnnnnnnnnnnnnnnnnnnnnnnnnnnnnnnnnnnnnnnnnnnnnnnnnnnnnnnnnnnnnnnnnnnnnnnnnnnnnnnnnnnnnnnnnnnnnnnnnnnnnnnnnnnnnnnnnnnnnnnnnnnnnnnnnnnnnnnnnnnnnnnnnnnnnnnnnnnnnnnnnnnnnnnnnnnnnnnnnnnnnnnnnnnnnnnnnnnnnnnnnnnnnnnnnnnnnnnnnnnnnnnnnnnnnnnnnnnnnnnnnnnnnnnnnnnnnnnnnnnnnnnnnnnnnnnnnnnnnnnnnnnnnnnnnnnnnnnnnnnnnnnnnnnnnnnnnnnnnnnnnnnnnnnnnnnnnnnnnnnnnnnnnnnnnnnnnnnnnnnnnnnnnnnnnnnnnnnnnnnnnnnnnnnnnnnnnnnnnnnnnnnnnnnnnnnnnnnnnnnnnnnnnnnnnnnnnnnnnnnnnnnnnnnnnnnnnnnnnnnnnnnnnnnnnnnnnnnnnnnnnnnnnnnnnnnnnnnnnnnnnnnnnnnnnnnnnnnnnnnnnnnnnnnnnnnnnnnnnnnnnnnnnnnnnnnnnnnnnnnnnnnnnnnnnnnnnnnnnnnnnnnnnnnnnnnnnnnnnnnnnnnnnnnnnnnnnnnnnnnnnnnnnnnnnnnnnnnnnnnnnnnnnnnnnnnnnnnnnnnnnnnnnnnnnnnnnnnnnnnnnnnnnnnnnnnnnnnnnnnnnnnnnnnnnnnnnnnnnnnnnnnnnnnnnnnnnnnnnnnnnnnnnnnnnnnnnnnnnnnnnnnnnnnnnnnnnnnnnnnnnnnnnnnnnnnnnnnnnnnnnnnnnnnnnnnnnnnnnnnnnnnnnnnnnnnnnnnnnnnnnnnnnnnnnnnnnnnnnnnnnnnnnnnnnnnnnnnnnnnnnnnnnnnnnnnnnnnnnnnnnnnnnnnnnnnnnnnnnnnnnnnnnnnnnnnnnnnnnnnnnnnnnnnnnnnnnnnnnnnnnnnnnnnnnnnnnnnnnnnnnnnnnnnnnnnnnnnnnnnnnnnnnnnnnnnnnnnnnnnnnnnnnnnnnnnnnnnnnnnnnnnnnnnnnnnnnnnnnnnnnnnnnnnnnnnnnnnnnnnnnnnnnnnnnnnnnnnnnnnnnnnnnnnnnnnnnnnnnnnnnnnnnnnnnnnnnnnnnnnnnnnnnnnnnnnnnnnnnnnnnnnnnnnnnnnnnnnnnnnnnnnnnnnnnnnnnnnnnnnnnnnnnnnnnnnnnnnnnnnnnnnnnnnnnnnnnnnnnnnnnnnnnnnnnnnnnnnnnnnnnnnnnnnnnnnnnnnnnnnnnnnnnnnnnnnnnnnnnnnnnnnnnnnnnnnnnnnnnnnnnnnnnnnnnnnnnnnnnnnnnnnnnnnnnnnnnnnnnnnnnnnnnnnnnnnnnnnnnnnnnnnnnnnnnnnnnnnnnnnnnnnnnnnnnnnnnnnnnnnnnnnnnnnnnnnnnnnnnnnnnnnnnnnnnnnnnnnnnnnnnnnnnnnnnnnnnnnnnnnnnnnnnnnnnnnnnnnnnnnnnnnnnnnnnnnnnnnnnnnnnnnnnnnnnnnnnnnnnnnnnnnnnnnnnnnnnnnnnnnnnnnnnnnnnnnnnnnnnnnnnnnnnnnnnnnnnnnnnnnnnnnnnnnnnnnnnnnnnnnnnnnnnnnnnnnnnnnnnnnnnnnnnnnnnnnnnnnnnnnnnnnnnnnnnnnnnnnnnnnnnnnnnnnnnnnnnnnnnnnnnnnnnnnnnnnnnnnnnnnnnnnnnnnnnnnnnnnnnnnnnnnnnnnnnnnnnnnnnnnnnnnnnnnnnnnnnnnnnnnnnnnnnnnnnnnnnnnnnnnnnnnnnnnnnnnnnnnnnnnnnnnnnnnnnnnnnnnnnnnnnnnnnnnnnnnnnnnnnnnnnnnnnnnnnnnnnnnnnnnnnnnnnnnnnnnnnnnnnnnnnnnnnnnnnnnnnnnnnnnnnnnnnnnnnnnnnnnnnnnnnnnnnnnnnnnnnnnnnnnnnnnnnnnnnnnnnnnnnnnnnnnnnnnnnnnnnnnnnnnnnnnnnnnnnnnnnnnnnnnnnnnnnnnnnnnnnnnnnnnnnnnnnnnnnnnnnnnnnnnnnnnnnnnnnnnnnnnnnnnnnnnnnnnnnnnnnnnnnnnnnnnnnnnnnnnnnnnnnnnnnnnnnnnnnnnnnnnnnnnnnnnnnnnnnnnnnnnnnnnnnnnnnnnnnnnnnnnnnnnnnnnnnnnnnnnnnnnnnnnnnnnnnnnnnnnnnnnnnnnnnnnnnnnnnnnnnnnnnnnnnnnnnnnnnnnnnnnnnnnnnnnnnnnnnnnnnnnnnnnnnnnnnnnnnnnnnnnnnnnnnnnnnnnnnnnnnnnnnnnnnnnnnnnnnnnnnnnnnnnnnnnnnnnnnnnnnnnnnnnnnnnnnnnnnnnnnnnnnnnnnnnnnnnnnnnnnnnnnnnnnnnnnnnnnnnnnnnnnnnnnnnnnnnnnnnnnnnnnnnnnnnnnnnnnnnnnnnnnnnnnnnnnnnnnnnnnnnnnnnnnnnnnnnnnnnnnnnnnnnnnnnnnnnnnnnnnnnnnnnnnnnnnnnnnnnnnnnnnnnnnnnnnnnnnnnnnnnnnnnnnnnnnnnnnnnnnnnnnnnnnnnnnnnnnnnnnnnnnnnnnnnnnnnnnnnnnnnnnnnnnnnnnnnnnnnnnnnnnnnnnnnnnnnnnnnnnnnnnnnnnnnnnnnnnnnnnnnnnnnnnnnnnnnnnnnnnnnnnnnnnnnnnnnnnnnnnnnnnnnnnnnnnnnnnnnnnnnnnnnnnnnnnnnnnnnnnnnnnnnnnnnnnnnnnnnnnnnnnnnnnnnnnnnnnnnnnnnnnnnnnnnnnnnnnnnnnnnnnnnnnnnnnnnnnnnnnnnnnnnnnnnnnnnnnnnnnnnnnnnnnnnnnnnnnnnnnnnnnnnnnnnnnnnnnnnnnnnnnnnnnnnnnnnnnnnnnnnnnnnnnnnnnnnnnnnnnnnnnnnnnnnnnnnnnnnnnnnnnnnnnnnnnnnnnnnnnnnnnnnnnnnnnnnnnnnnnnnnnnnnnnnnnnnnnnnnnnnnnnnnnnnnnnnnnnnnnnnnnnnnnnnnnnnnnnnnnnnnnnnnnnnnnnnnnnnnnnnnnnnnnnnnnnnnnnnnnnnnnnnnnnnnnnnnnnnnnnnnnnnnnnnnnnnnnnnnnnnnnnnnnnnnnnnnnnnnnnnnnnnnnnnnnnnnnnnnnnnnnnnnnnnnnnnnnnnnnnnnnnnnnnnnnnnnnnnnnnnnnnnnnnnnnnnnnnnnnnnnnnnnnnnnnnnnnnnnnnnnnnnnnnnnnnnnnnnnnnnnnnnnnnnnnnnnnnnnnnnnnnnnnnnnnnnnnnnnnnnnnnnnnnnnnnnnnnnnnnnnnnnnnnnnnnnnnnnnnnnnnnnnnnnnnnnnnnnnnnnnnnnnnnnnnnnnnnnnnnnnnnnnnnnnnnnnnnnnnnnnnnnnnnnnnnnnnnnnnnnnnnnnnnnnnnnnnnnnnnnnnnnnnnnnnnnnnnnnnnnnnnnnnnnnnnnnnnnnnnnnnnnnnnnnnnnnnnnnnnnnnnnnnnnnnnnnnnnnnnnnnnnnnnnnnnnnnnnnnnnnnnnnnnnnnnnnnnnnnnnnnnnnnnnnnnnnnnnnnnnnnnnnnnnnnnnnnnnnnnnnnnnnnnnnnnnnnnnnnnnnnnnnnnnnnnnnnnnnnnnnnnnnnnnnnnnnnnnnnnnnnnnnnnnnnnnnnnnnnnnnnnnnnnnnnnnnnnnnnnnnnnnnnnnnnnnnnnnnnnnnnnnnnnnnnnnnnnnnnnnnnnnnnnnnnnnnnnnnnnnnnnnnnnnnnnnnnnnnnnnnnnnnnnnnnnnnnnnnnnnnnnnnnnnnnnnnnnnnnnnnnnnnnnnnnnnnnnnnnnnnnnnnnnnnnnnnnnnnnnnnnnnnnnnnnnnnnnnnnnnnnnnnnnnnnnnnnnnnnnnnnnnnnnnnnnnnnnnnnnnnnnnnnnnnnnnnnnnnnnnnnnnnnnnnnnnnnnnnnnnnnnnnnnnnnnnnnnnnnnnnnnnnnnnnnnnnnnnnnnnnnnnnnnnnnnnnnnnnnnnnnnnnnnnnnnnnnnnnnnnnnnnnnnnnnnnnnnnnnnnnnnnnnnnnnnnnnnnnnnnnnnnnnnnnnnnnnnnnnnnnnnnnnnnnnnnnnnnnnnnnnnnnnnnnnnnnnnnnnnnnnnnnnnnnnnnnnnnnnnnnnnnnnnnnnnnnnnnnnnnnnnnnnnnnnnnnnnnnnnnnnnnnnnnnnnnnnnnnnnnnnnnnnnnnnnnnnnnnnnnnnnnnnnnnnnnnnnnnnnnnnnnnnnnnnnnnnnnnnnnnnnnnnnnnnnnnnnnnnnnnnnnnnnnnnnnnnnnnnnnnnnnnnnnnnnnnnnnnnnnnnnnnnnnnnnnnnnnnnnnnnnnnnnnnnnnnnnnnnnnnnnnnnnnnnnnnnnnnnnnnnnnnnnnnnnnnnnnnnnnnnnnnnnnnnnnnnnnnnnnnnnnnnnnnnnnnnnnnnnnnnnnnnnnnnnnnnnnnnnnnnnnnnnnnnnnnnnnnnnnnnnnnnnnnnnnnnnnnnnnnnnnnnnnnnnnnnnnnnnnnnnnnnnnnnnnnnnnnnnnnnnnnnnnnnnnnnnnnnnnnnnnnnnnnnnnnnnnnnnnnnnnnnnnnnnnnnnnnnnnnnnnnnnnnnnnnnnnnnnnnnnnnnnnnnnnnnnnnnnnnnnnnnnnnnnnnnnnnnnnnnnnnnnnnnnnnnnnnnnnnnnnnnnnnnnnnnnnnnnnnnnnnnnnnnnnnnnnnnnnnnnnnnnnnnnnnnnnnnnnnnnnnnnnnnnnnnnnnnnnnnnnnnnnnnnnnnnnnnnnnnnnnnnnnnnnnnnnnnnnnnnnnnnnnnnnnnnnnnnnnnnnnnnnnnnnnnnnnnnnnnnnnnnnnnnnnnnnnnnnnnnnnnnnnnnnnnnnnnnnnnnnnnnnnnnnnnnnnnnnnnnnnnnnnnnnnnnnnnnnnnnnnnnnnnnnnnnnnnnnnnnnnnnnnnnnnnnnnnnnnnnnnnnnnnnnnnnnnnnnnnnnnnnnnnnnnnnnnnnnnnnnnnnnnnnnnnnnnnnnnnnnnnnnnnnnnnnnnnnnnnnnnnnnnnnnnnnnnnnnnnnnnnnnnnnnnnnnnnnnnnnnnnnnnnnnnnnnnnnnnnnnnnnnnnnnnnnnnnnnnnnnnnnnnnnnnnnnnnnnnnnnnnnnnnnnnnnnnnnnnnnnnnnnnnnnnnnnnnnnnnnnnnnnnnnnnnnnnnnnnnnnnnnnnnnnnnnnnnnnnnnnnnnnnnnnnnnnnnnnnnnnnnnnnnnnnnnnnnnnnnnnnnnnnnnnnnnnnnnnnnnnnnnnnnnnnnnnnnnnnnnnnnnnnnnnnnnnnnnnnnnnnnnnnnnnnnnnnnnnnnnnnnnnnnnnnnnnnnnnnnnnnnnnnnnnnnnnnnnnnnnnnnnnnnnnnnnnnnnnnnnnnnnnnnnnnnnnnnnnnnnnnnnnnnnnnnnnnnnnnnnnnnnnnnnnnnnnnnnnnnnnnnnnnnnnnnnnnnnnnnnnnnnnnnnnnnnnnnnnnnnnnnnnnnnnnnnnnnnnnnnnnnnnnnnnnnnnnnnnnnnnnnnnnnnnnnnnnnnnnnnnnnnnnnnnnnnnnnnnnnnnnnnnnnnnnnnnnnnnnnnnnnnnnnnnnnnnnnnnnnnnnnnnnnnnnnnnnnnnnnnnnnnnnnnnnnnnnnnnnnnnnnnnnnnnnnnnnnnnnnnnnnnnnnnnnnnnnnnnnnnnnnnnnnnnnnnnnnnnnnnnnnnnnnnnnnnnnnnnnnnnnnnnnnnnnnnnnnnnnnnnnnnnnnnnnnnnnnnnnnnnnnnnnnnnnnnnnnnnnnnnnnnnnnnnnnnnnnnnnnnnnnnnnnnnnnnnnnnnnnnnnnnnnnnnnnnnnnnnnnnnnnnnnnnnnnnnnnnnnnnnnnnnnnnnnnnnnnnnnnnnnnnnnnnnnnnnnnnnnnnnnnnnnnnnnnnnnnnnnnnnnnnnnnnnnnnnnnnnnnnnnnnnnnnnnnnnnnnnnnnnnnnnnnnnnnnnnnnnnnnnnnnnnnnnnnnnnnnnnnnnnnnnnnnnnnnnnnnnnnnnnnnnnnnnnnnnnnnnnnnnnnnnnnnnnnnnnnnnnnnnnnnnnnnnnnnnnnnnnnnnnnnnnnnnnnnnnnnnnnnnnnnnnnnnnnnnnnnnnnnnnnnnnnnnnnnnnnnnnnnnnnnnnnnnnnnnnnnnnnnnnnnnnnnnnnnnnnnnnnnnnnnnnnnnnnnnnnnnnnnnnnnnnnnnnnnnnnnnnnnnnnnnnnnnnnnnnnnnnnnnnnnnnnnnnnnnnnnnnnnnnnnnnnnnnnnnnnnnnnnnnnnnnnnnnnnnnnnnnnnnnnnnnnnnnnnnnnnnnnnnnnnnnnnnnnnnnnnnnnnnnnnnnnnnnnnnnnnnnnnnnnnnnnnnnnnnnnnnnnnnnnnnnnnnnnnnnnnnnnnnnnnnnnnnnnnnnnnnnnnnnnnnnnnnnnnnnnnnnnnnnnnnnnnnnnnnnnnnnnnnnnnnnnnnnnnnnnnnnnnnnnnnnnnnnnnnnnnnnnnnnnnnnnnnnnnnnnnnnnnnnnnnnnnnnnnnnnnnnnnnnnnnnnnnnnnnnnnnnnnnnnnnnnnnnnnnnnnnnnnnnnnnnnnnnnnnnnnnnnnnnnnnnnnnnnnnnnnnnnnnnnnnnnnnnnnnnnnnnnnnnnnnnnnnnnnnnnnnnnnnnnnnnnnnnnnnnnnnnnnnnnnnnnnnnnnnnnnnnnnnnnnnnnnnnnnnnnnnnnnnnnnnnnnnnnnnnnnnnnnnnnnnnnnnnnnnnnnnnnnnnnnnnnnnnnnnnnnnnnnnnnnnnnnnnnnnnnnnnnnnnnnnnnnnnnnnnnnnnnnnnnnnnnnnnnnnnnnnnnnnnnnnnnnnnnnnnnnnnnnnnnnnnnnnnnnnnnnnnnnnnnnnnnnnnnnnnnnnnnnnnnnnnnnnnnnnnnnnnnnnnnnnnnnnnnnnnnnnnnnnnnnnnnnnnnnnnnnnnnnnnnnnnnnnnnnnnnnnnnnnnnnnnnnnnnnnnnnnnnnnnnnnnnnnnnnnnnnnnnnnnnnnnnnnnnnnnnnnnnnnnnnnnnnnnnnnnnnnnnnnnnnnnnnnnnnnnnnnnnnnnnnnnnnnnnnnnnnnnnnnnnnnnnnnnnnnnnnnnnnnnnnnnnnnnnnnnnnnnnnnnnnnnnnnnnnnnnnnnnnnnnnnnnnnnnnnnnnnnnnnnnnnnnnnnnnnnnnnnnnnnnnnnnnnnnnnnnnnnnnnnnnnnnnnnnnnnnnnnnnnnnnnnnnnnnnnnnnnnnnnnnnnnnnnnnnnnnnnnnnnnnnnnnnnnnnnnnnnnnnnnnnnnnnnnnnnnnnnnnnnnnnnnnnnnnnnnnnnnnnnnnnnnnnnnnnnnnnnnnnnnnnnnnnnnnnnnnnnnnnnnnnnnnnnnnnnnnnnnnnnnnnnnnnnnnnnnnnnnnnnnnnnnnnnnnnnnnnnnnnnnnnnnnnnnnnnnnnnnnnnnnnnnnnnnnnnnnnnnnnnnnnnnnnnnnnnnnnnnnnnnnnnnnnnnnnnnnnnnnnnnnnnnnnnnnnnnnnnnnnnnnnnnnnnnnnnnnnnnnnnnnnnnnnnnnnnnnnnnnnnnnnnnnnnnnnnnnnnnnnnnnnnnnnnnnnnnnnnnnnnnnnnnnnnnnnnnnnnnnnnnnnnnnnnnnnnnnnnnnnnnnnnnnnnnnnnnnnnnnnnnnnnnnnnnnnnnnnnnnnnnnnnnnnnnnnnnnnnnnnnnnnnnnnnnnnnnnnnnnnnnnnnnnnnnnnnnnnnnnnnnnnnnnnnnnnnnnnnnnnnnnnnnnnnnnnnnnnnnnnnnnnnnnnnnnnnnnnnnnnnnnnnnnnnnnnnnnnnnnnnnnnnnnnnnnnnnnnnnnnnnnnnnnnnnnnnnnnnnnnnnnnnnnnnnnnnnnnnnnnnnnnnnnnnnnnnnnnnnnnnnnnnnnnnnnnnnnnnnnnnnnnnnnnnnnnnnnnnnnnnnnnnnnnnnnnnnnnnnnnnnnnnnnnnnnnnnnnnnnnnnnnnnnnnnnnnnnnnnnnnnnnnnnnnnnnnnnnnnnnnnnnnnnnnnnnnnnnnnnnnnnnnnnnnnnnnnnnnnnnnnnnnnnnnnnnnnnnnnnnnnnnnnnnnnnnnnnnnnnnnnnnnnnnnnnnnnnnnnnnnnnnnnnnnnnnnnnnnnnnnnnnnnnnnnnnnnnnnnnnnnnnnnnnnnnnnnnnnnnnnnnnnnnnnnnnnnnnnnnnnnnnnnnnnnnnnnnnnnnnnnnnnnnnnnnnnnnnnnnnnnnnnnnnnnnnnnnnnnnnnnnnnnnnnnnnnnnnnnnnnnnnnnnnnnnnnnnnnnnnnnnnnnnnnnnnnnnnnnnnnnnnnnnnnnnnnnnnnnnnnnnnnnnnnnnnnnnnnnnnnnnnnnnnnnnnnnnnnnnnnnnnnnnnnnnnnnnnnnnnnnnnnnnnnnnnnnnnnnnnnnnnnnnnnnnnnnnnnnnnnnnnnnnnnnnnnnnnnnnnnnnnnnnnnnnnnnnnnnnnnnnnnnnnnnnnnnnnnnnnnnnnnnnnnnnnnnnnnnnnnnnnnnnnnnnnnnnnnnnnnnnnnnnnnnnnnnnnnnnnnnnnnnnnnnnnnnnnnnnnnnnnnnnnnnnnnnnnnnnnnnnnnnnnnnnnnnnnnnnnnnnnnnnnnnnnnnnnnnnnnnnnnnnnnnnnnnnnnnnnnnnnnnnnnnnnnnnnnnnnnnnnnnnnnnnnnnnnnnnnnnnnnnnnnnnnnnnnnnnnnnnnnnnnnnnnnnnnnnnnnnnnnnnnnnnnnnnnnnnnnnnnnnnnnnnnnnnnnnnnnnnnnnnnnnnnnnnnnnnnnnnnnnnnnnnnnnnnnnnnnnnnnnnnnnnnnnnnnnnnnnnnnnnnnnnnnnnnnnnnnnnnnnnnnnnnnnnnnnnnnnnnnnnnnnnnnnnnnnnnnnnnnnnnnnnnnnnnnnnnnnnnnnnnnnnnnnnnnnnnnnnnnnnnnnnnnnnnnnnnnnnnnnnnnnnnnnnnnnnnnnnnnnnnnnnnnnnnnnnnnnnnnnnnnnnnnnnnnnnnnnnnnnnnnnnnnnnnnnnnnnnnnnnnnnnnnnnnnnnnnnnnnnnnnnnnnnnnnnnnnnnnnnnnnnnnnnnnnnnnnnnnnnnnnnnnnnnnnnnnnnnnnnnnnnnnnnnnnnnnnnnnnnnnnnnnnnnnnnnnnnnnnnnnnnnnnnnnnnnnnnnnnnnnnnnnnnnnnnnnnnnnnnnnnnnnnnnnnnnnnnnnnnnnnnnnnnnnnnnnnnnnnnnnnnnnnnnnnnnnnnnnnnnnnnnnnnnnnnnnnnnnnnnnnnnnnnnnnnnnnnnnnnnnnnnnnnnnnnnnnnnnnnnnnnnnnnnnnnnnnnnnnnnnnnnnnnnnnnnnnnnnnnnnnnnnnnnnnnnnnnnnnnnnnnnnnnnnnnnnnnnnnnnnnnnnnnnnnnnnnnnnnnnnnnnnnnnnnnnnnnnnnnnnnnnnnnnnnnnnnnnnnnnnnnnnnnnnnnnnnnnnnnnnnnnnnnnnnnnnnnnnnnnnnnnnnnnnnnnnnnnnnnnnnnnnnnnnnnnnnnnnnnnnnnnnnnnnnnnnnnnnnnnnnnnnnnnnnnnnnnnnnnnnnnnnnnnnnnnnnnnnnnnnnnnnnnnnnnnnnnnnnnnnnnnnnnnnnnnnnnnnnnnnnnnnnnnnnnnnnnnnnnnnnnnnnnnnnnnnnnnnnnnnnnnnnnnnnnnnnnnnnnnnnnnnnnnnnnnnnnnnnnnnnnnnnnnnnnnnnnnnnnnnnnnnnnnnnnnnnnnnnnnnnnnnnnnnnnnnnnnnnnnnnnnnnnnnnnnnnnnnnnnnnnnnnnnnnnnnnnnnnnnnnnnnnnnnnnnnnnnnnnnnnnnnnnnnnnnnnnnnnnnnnnnnnnnnnnnnnnnnnnnnnnnnnnnnnnnnnnnnnnnnnnnnnnnnnnnnnnnnnnnnnnnnnnnnnnnnnnnnnnnnnnnnnnnnnnnnnnnnnnnnnnnnnnnnnnnnnnnnnnnnnnnnnnnnnnnnnnnnnnnnnnnnnnnnnnnnnnnnnnnnnnnnnnnnnnnnnnnnnnnnnnnnnnnnnnnnnnnnnnnnnnnnnnnnnnnnnnnnnnnnnnnnnnnnnnnnnnnnnnnnnnnnnnnnnnnnnnnnnnnnnnnnnnnnnnnnnnnnnnnnnnnnnnnnnnnnnnnnnnnnnnnnnnnnnnnnnnnnnnnnnnnnnnnnnnnnnnnnnnnnnnnnnnnnnnnnnnnnnnnnnnnnnnnnnnnnnnnnnnnnnnnnnnnnnnnnnnnnnnnnnnnnnnnnnnnnnnnnnnnnnnnnnnnnnnnnnnnnnnnnnnnnnnnnnnnnnnnnnnnnnnnnnnnnnnnnnnnnnnnnnnnnnnnnnnnnnnnnnnnnnnnnnnnnnnnnnnnnnnnnnnnnnnnnnnnnnnnnnnnnnnnnnnnnnnnnnnnnnnnnnnnnnnnnnnnnnnnnnnnnnnnnnnnnnnnnnnnnnnnnnnnnnnnnnnnnnnnnnnnnnnnnnnnnnnnnnnnnnnnnnnnnnnnnnnnnnnnnnnnnnnnnnnnnnnnnnnnnnnnnnnnnnnnnnnnnnnnnnnnnnnnnnnnnnnnnnnnnnnnnnnnnnnnnnnnnnnnnnnnnnnnnnnnnnnnnnnnnnnnnnnnnnnnnnnnnnnnnnnnnnnnnnnnnnnnnnnnnnnnnnnnnnnnnnnnnnnnnnnnnnnnnnnnnnnnnnnnnnnnnnnnnnnnnnnnnnnnnnnnnnnnnnnnnnnnnnnnnnnnnnnnnnnnnnnnnnnnnnnnnnnnnnnnnnnnnnnnnnnnnnnnnnnnnnnnnnnnnnnnnnnnnnnnnnnnnnnnnnnnnnnnnnnnnnnnnnnnnnnnnnnnnnnnnnnnnnnnnnnnnnnnnnnnnnnnnnnnnnnnnnnnnnnnnnnnnnnnnnnnnnnnnnnnnnnnnnnnnnnnnnnnnnnnnnnnnnnnnnnnnnnnnnnnnnnnnnnnnnnnnnnnnnnnnnnnnnnnnnnnnnnnnnnnnnnnnnnnnnnnnnnnnnnnnnnnnnnnnnnnnnnnnnnnnnnnnnnnnnnnnnnnnnnnnnnnnnnnnnnnnnnnnnnnnnnnnnnnnnnnnnnnnnnnnnnnnnnnnnnnnnnnnnnnnnnnnnnnnnnnnnnnnnnnnnnnnnnnnnnnnnnnnnnnnnnnnnnnnnnnnnnnnnnnnnnnnnnnnnnnnnnnnnnnnnnnnnnnnnnnnnnnnnnnnnnnnnnnnnnnnnnnnnnnnnnnnnnnnnnnnnnnnnnnnnnnnnnnnnnnnnnnnnnnnnnnnnnnnnnnnnnnnnnnnnnnnnnnnnnnnnnnnnnnnnnnnnnnnnnnnnnnnnnnnnnnnnnnnnnnnnnnnnnnnnnnnnnnnnnnnnnnnnnnnnnnnnnnnnnnnnnnnnnnnnnnnnnnnnnnnnnnnnnnnnnnnnnnnnnnnnnnnnnnnnnnnnnnnnnnnnnnnnnnnnnnnnnnnnnnnnnnnnnnnnnnnnnnnnnnnnnnnnnnnnnnnnnnnnnnnnnnnnnnnnnnnnnnnnnnnnnnnnnnnnnnnnnnnnnnnnnnnnnnnnnnnnnnnnnnnnnnnnnnnnnnnnnnnnnnnnnnnnnnnnnnnnnnnnnnnnnnnnnnnnnnnnnnnnnnnnnnnnnnnnnnnnnnnnnnnnnnnnnnnnnnnnnnnnnnnnnnnnnnnnnnnnnnnnnnnnnnnnnnnnnnnnnnnnnnnnnnnnnnnnnnnnnnnnnnnnnnnnnnnnnnnnnnnnnnnnnnnnnnnnnnnnnnnnnnnnnnnnnnnnnnnnnnnnnnnnnnnnnnnnnnnnnnnnnnnnnnnnnnnnnnnnnnnnnnnnnnnnnnnnnnnnnnnnnnnnnnnnnnnnnnnnnnnnnnnnnnnnnnnnnnnnnnnnnnnnnnnnnnnnnnnnnnnnnnnnnnnnnnnnnnnnnnnnnnnnnnnnnnnnnnnnnnnnnnnnnnnnnnnnnnnnnnnnnnnnnnnnnnnnnnnnnnnnnnnnnnnnnnnnnnnnnnnnnnnnnnnnnnnnnnnnnnnnnnnnnnnnnnnnnnnnnnnnnnnnnnnnnnnnnnnnnnnnnnnnnnnnnnnnnnnnnnnnnnnnnnnnnnnnnnnnnnnnnnnnnnnnnnnnnnnnnnnnnnnnnnnnnnnnnnnnnnnnnnnnnnnnnnnnnnnnnnnnnnnnnnnnnnnnnnnnnnnnnnnnnnnnnnnnnnnnnnnnnnnnnnnnnnnnnnnnnnnnnnnnnnnnnnnnnnnnnnnnnnnnnnnnnnnnnnnnnnnnnnnnnnnnnnnnnnnnnnnnnnnnnnnnnnnnnnnnnnnnnnnnnnnnnnnnnnnnnnnnnnnnnnnnnnnnnnnnnnnnnnnnnnnnnnnnnnnnnnnnnnnnnnnnnnnnnnnnnnnnnnnnnnnnnnnnnnnnnnnnnnnnnnnnnnnnnnnnnnnnnnnnnnnnnnnnnnnnnnnnnnnnnnnnnnnnnnnnnnnnnnnnnnnnnnnnnnnnnnnnnnnnnnnnnnnnnnnnnnnnnnnnnnnnnnnnnnnnnnnnnnnnnnnnnnnnnnnnnnnnnnnnnnnnnnnnnnnnnnnnnnnnnnnnnnnnnnnnnnnnnnnnnnnnnnnnnnnnnnnnnnnnnnnnnnnnnnnnnnnnnnnnnnnnnnnnnnnnnnnnnnnnnnnnnnnnnnnnnnnnnnnnnnnnnnnnnnnnnnnnnnnnnnnnnnnnnnnnnnnnnnnnnnnnnnnnnnnnnnnnnnnnnnnnnnnnnnnnnnnnnnnnnnnnnnnnnnnnnnnnnnnnnnnnnnnnnnnnnnnnnnnnnnnnnnnnnnnnnnnnnnnnnnnnnnnnnnnnnnnnnnnnnnnnnnnnnnnnnnnnnnnnnnnnnnnnnnnnnnnnnnnnnnnnnnnnnnnnnnnnnnnnnnnnnnnnnnnnnnnnnnnnnnnnnnnnnnnnnnnnnnnnnnnnnnnnnnnnnnnnnnnnnnnnnnnnnnnnnnnnnnnnnnnnnnnnnnnnnnnnnnnnnnnnnnnnnnnnnnnnnnnnnnnnnnnnnnnnnnnnnnnnnnnnnnnnnnnnnnnnnnnnnnnnnnnnnnnnnnnnnnnnnnnnnnnnnnnnnnnnnnnnnnnnnnnnnnnnnnnnnnnnnnnnnnnnnnnnnnnnnnnnnnnnnnnnnnnnnnnnnnnnnnnnnnnnnnnnnnnnnnnnnnnnnnnnnnnnnnnnnnnnnnnnnnnnnnnnnnnnnnnnnnnnnnnnnnnnnnnnnnnnnnnnnnnnnnnnnnnnnnnnnnnnnnnnnnnnnnnnnnnnnnnnnnnnnnnnnnnnnnnnnnnnnnnnnnnnnnnnnnnnnnnnnnnnnnnnnnnnnnnnnnnnnnnnnnnnnnnnnnnnnnnnnnnnnnnnnnnnnnnnnnnnnnnnnnnnnnnnnnnnnnnnnnnnnnnnnnnnnnnnnnnnnnnnnnnnnnnnnnnnnnnnnnnnnnnnnnnnnnnnnnnnnnnnnnnnnnnnnnnnnnnnnnnnnnnnnnnnnnnnnnnnnnnnnnnnnnnnnnnnnnnnnnnnnnnnnnnnnnnnnnnnnnnnnnnnnnnnnnnnnnnnnnnnnnnnnnnnnnnnnnnnnnnnnnnnnnnnnnnnnnnnnnnnnnnnnnnnnnnnnnnnnnnnnnnnnnnnnnnnnnnnnnnnnnnnnnnnnnnnnnnnnnnnnnnnnnnnnnnnnnnnnnnnnnnnnnnnnnnnnnnnnnnnnnnnnnnnnnnnnnnnnnnnnnnnnnnnnnnnnnnnnnnnnnnnnnnnnnnnnnnnnnnnnnnnnnnnnnnnnnnnnnnnnnnnnnnnnnnnnnnnnnnnnnnnnnnnnnnnnnnnnnnnnnnnnnnnnnnnnnnnnnnnnnnnnnnnnnnnnnnnnnnnnnnnnnnnnnnnnnnnnnnnnnnnnnnnnnnnnnnnnnnnnnnnnnnnnnnnnnnnnnnnnnnnnnnnnnnnnnnnnnnnnnnnnnnnnnnnnnnnnnnnnnnnnnnnnnnnnnnnnnnnnnnnnnnnnnnnnnnnnnnnnnnnnnnnnnnnnnnnnnnnnnnnnnnnnnnnnnnnnnnnnnnnnnnnnnnnnnnnnnnnnnnnnnnnnnnnnnnnnnnnnnnnnnnnnnnnnnnnnnnnnnnnnnnnnnnnnnnnnnnnnnnnnnnnnnnnnnnnnnnnnnnnnnnnnnnnnnnnnnnnnnnnnnnnnnnnnnnnnnnnnnnnnnnnnnnnnnnnnnnnnnnnnnnnnnnnnnnnnnnnnnnnnnnnnnnnnnnnnnnnnnnnnnnnnnnnnnnnnnnnnnnnnnnnnnnnnnnnnnnnnnnnnnnnnnnnnnnnnnnnnnnnnnnnnnnnnnnnnnnnnnnnnnnnnnnnnnnnnnnnnnnnnnnnnnnnnnnnnnnnnnnnnnnnnnnnnnnnnnnnnnnnnnnnnnnnnnnnnnnnnnnnnnnnnnnnnnnnnnnnnnnnnnnnnnnnnnnnnnnnnnnnnnnnnnnnnnnnnnnnnnnnnnnnnnnnnnnnnnnnnnnnnnnnnnnnnnnnnnnnnnnnnnnnnnnnnnnnnnnnnnnnnnnnnnnnnnnnnnnnnnnnnnnnnnnnnnnnnnnnnnnnnnnnnnnnnnnnnnnnnnnnnnnnnnnnnnnnnnnnnnnnnnnnnnnnnnnnnnnnnnnnnnnnnnnnnnnnnnnnnnnnnnnnnnnnnnnnnnnnnnnnnnnnnnnnnnnnnnnnnnnnnnnnnnnnnnnnnnnnnnnnnnnnnnnnnnnnnnnnnnnnnnnnnnnnnnnnnnnnnnnnnnnnnnnnnnnnnnnnnnnnnnnnnnnnnnnnnnnnnnnnnnnnnnnnnnnnnnnnnnnnnnnnnnnnnnnnnnnnnnnnnnnnnnnnnnnnnnnnnnnnnnnnnnnnnnnnnnnnnnnnnnnnnnnnnnnnnnnnnnnnnnnnnnnnnnnnnnnnnnnnnnnnnnnnnnnnnnnnnnnnnnnnnnnnnnnnnnnnnnnnnnnnnnnnnnnnnnnnnnnnnnnnnnnnnnnnnnnnnnnnnnnnnnnnnnnnnnnnnnnnnnnnnnnnnnnnnnnnnnnnnnnnnnnnnnnnnnnnnnnnnnnnnnnnnnnnnnnnnnnnnnnnnnnnnnnnnnnnnnnnnnnnnnnnnnnnnnnnnnnnnnnnnnnnnnnnnnnnnnnnnnnnnnnnnnnnnnnnnnnnnnnnnnnnnnnnnnnnnnnnnnnnnnnnnnnnnnnnnnnnnnnnnnnnnnnnnnnnnnnnnnnnnnnnnnnnnnnnnnnnnnnnnnnnnnnnnnnnnnnnnnnnnnnnnnnnnnnnnnnnnnnnnnnnnnnnnnnnnnnnnnnnnnnnnnnnnnnnnnnnnnnnnnnnnnnnnnnnnnnnnnnnnnnnnnnnnnnnnnnnnnnnnnnnnnnnnnnnnnnnnnnnnnnnnnnnnnnnnnnnnnnnnnnnnnnnnnnnnnnnnnnnnnnnnnnnnnnnnnnnnnnnnnnnnnnnnnnnnnnnnnnnnnnnnnnnnnnnnnnnnnnnnnnnnnnnnnnnnnnnnnnnnnnnnnnnnnnnnnnnnnnnnnnnnnnnnnnnnnnnnnnnnnnnnnnnnnnnnnnnnnnnnnnnnnnnnnnnnnnnnnnnnnnnnnnnnnnnnnnnnnnnnnnnnnnnnnnnnnnnnnnnnnnnnnnnnnnnnnnnnnnnnnnnnnnnnnnnnnnnnnnnnnnnnnnnnnnnnnnnnnnnnnnnnnnnnnnnnnnnnnnnnnnnnnnnnnnnnnnnnnnnnnnnnnnnnnnnnnnnnnnnnnnnnnnnnnnnnnnnnnnnnnnnnnnnnnnnnnnnnnnnnnnnnnnnnnnnnnnnnnnnnnnnnnnnnnnnnnnnnnnnnnnnnnnnnnnnnnnnnnnnnnnnnnnnnnnnnnnnnnnnnnnnnnnnnnnnnnnnnnnnnnnnnnnnnnnnnnnnnnnnnnnnnnnnnnnnnnnnnnnnnnnnnnnnnnnnnnnnnnnnnnnnnnnnnnnnnnnnnnnnnnnnnnnnnnnnnnnnnnnnnnnnnnnnnnnnnnnnnnnnnnnnnnnnnnnnnnnnnnnnnnnnnnnnnnnnnnnnnnnnnnnnnnnnnnnnnnnnnnnnnnnnnnnnnnnnnnnnnnnnnnnnnnnnnnnnnnnnnnnnnnnnnnnnnnnnnnnnnnnnnnnnnnnnnnnnnnnnnnnnnnnnnnnnnnnnnnnnnnnnnnnnnnnnnnnnnnnnnnnnnnnnnnnnnnnnnnnnnnnnnnnnnnnnnnnnnnnnnnnnnnnnnnnnnnnnnnnnnnnnnnnnnnnnnnnnnnnnnnnnnnnnnnnnnnnnnnnnnnnnnnnnnnnnnnnnnnnnnnnnnnnnnnnnnnnnnnnnnnnnnnnnnnnnnnnnnnnnnnnnnnnnnnnnnnnnnnnnnnnnnnnnnnnnnnnnnnnnnnnnnnnnnnnnnnnnnnnnnnnnnnnnnnnnnnnnnnnnnnnnnnnnnnnnnnnnnnnnnnnnnnnnnnnnnnnnnnnnnnnnnnnnnnnnnnnnnnnnnnnnnnnnnnnnnnnnnnnnnnnnnnnnnnnnnnnnnnnnnnnnnnnnnnnnnnnnnnnnnnnnnnnnnnnnnnnnnnnnnnnnnnnnnnnnnnnnnnnnnnnnnnnnnnnnnnnnnnnnnnnnnnnnnnnnnnnnnnnnnnnnnnnnnnnnnnnnnnnnnnnnnnnnnnnnnnnnnnnnnnnnnnnnnnnnnnnnnnnnnnnnnnnnnnnnnnnnnnnnnnnnnnnnnnnnnnnnnnnnnnnnnnnnnnnnnnnnnnnnnnnnnnnnnnnnnnnnnnnnnnnnnnnnnnnnnnnnnnnnnnnnnnnnnnnnnnnnnnnnnnnnnnnnnnnnnnnnnnnnnnnnnnnnnnnnnnnnnnnnnnnnnnnnnnnnnnnnnnnnnnnnnnnnnnnnnnnnnnnnnnnnnnnnnnnnnnnnnnnnnnnnnnnnnnnnnnnnnnnnnnnnnnnnnnnnnnnnnnnnnnnnnnnnnnnnnnnnnnnnnnnnnnnnnnnnnnnnnnnnnnnnnnnnnnnnnnnnnnnnnnnnnnnnnnnnnnnnnnnnnnnnnnnnnnnnnnnnnnnnnnnnnnnnnnnnnnnnnnnnnnnnnnnnnnnnnnnnnnnnnnnnnnnnnnnnnnnnnnnnnnnnnnnnnnnnnnnnnnnnnnnnnnnnnnnnnnnnnnnnnnnnnnnnnnnnnnnnnnnnnnnnnnnnnnnnnnnnnnnnnnnnnnnnnnnnnnnnnnnnnnnnnnnnnnnnnnnnnnnnnnnnnnnnnnnnnnnnnnnnnnnnnnnnnnnnnnnnnnnnnnnnnnnnnnnnnnnnnnnnnnnnnnnnnnnnnnnnnnnnnnnnnnnnnnnnnnnnnnnnnnnnnnnnnnnnnnnnnnnnnnnnnnnnnnnnnnnnnnnnnnnnnnnnnnnnnnnnnnnnnnnnnnnnnnnnnnnnnnnnnnnnnnnnnnnnnnnnnnnnnnnnnnnnnnnnnnnnnnnnnnnnnnnnnnnnnnnnnnnnnnnnnnnnnnnnnnnnnnnnnnnnnnnnnnnnnnnnnnnnnnnnnnnnnnnnnnnnnnnnnnnnnnnnnnnnnnnnnnnnnnnnnnnnnnnnnnnnnnnnnnnnnnnnnnnnnnnnnnnnnnnnnnnnnnnnnnnnnnnnnnnnnnnnnnnnnnnnnnnnnnnnnnnnnnnnnnnnnnnnnnnnnnnnnnnnnnnnnnnnnnnnnnnnnnnnnnnnnnnnnnnnnnnnnnnnnnnnnnnnnnnnnnnnnnnnnnnnnnnnnnnnnnnnnnnnnnnnnnnnnnnnnnnnnnnnnnnnnnnnnnnnnnnnnnnnnnnnnnnnnnnnnnnnnnnnnnnnnnnnnnnnnnnnnnnnnnnnnnnnnnnnnnnnnnnnnnnnnnnnnnnnnnnnnnnnnnnnnnnnnnnnnnnnnnnnnnnnnnnnnnnnnnnnnnnnnnnnnnnnnnnnnnnnnnnnnnnnnnnnnnnnnnnnnnnnnnnnnnnnnnnnnnnnnnnnnnnnnnnnnnnnnnnnnnnnnnnnnnnnnnnnnnnnnnnnnnnnnnnnnnnnnnnnnnnnnnnnnnnnnnnnnnnnnnnnnnnnnnnnnnnnnnnnnnnnnnnnnnnnnnnnnnnnnnnnnnnnnnnnnnnnnnnnnnnnnnnnnnnnnnnnnnnnnnnnnnnnnnnnnnnnnnnnnnnnnnnnnnnnnnnnnnnnnnnnnnnnnnnnnnnnnnnnnnnnnnnnnnnnnnnnnnnnnnnnnnnnnnnnnnnnnnnnnnnnnnnnnnnnnnnnnnnnnnnnnnnnnnnnnnnnnnnnnnnnnnnnnnnnnnnnnnnnnnnnnnnnnnnnnnnnnnnnnnnnnnnnnnnnnnnnnnnnnnnnnnnnnnnnnnnnnnnnnnnnnnnnnnnnnnnnnnnnnnnnnnnnnnnnnnnnnnnnnnnnnnnnnnnnnnnnnnnnnnnnnnnnnnnnnnnnnnnnnnnnnnnnnnnnnnnnnnnnnnnnnnnnnnnnnnnnnnnnnnnnnnnnnnnnnnnnnnnnnnnnnnnnnnnnnnnnnnnnnnnnnnnnnnnnnnnnnnnnnnnnnnnnnnnnnnnnnnnnnnnnnnnnnnnnnnnnnnnnnnnnnnnnnnnnnnnnnnnnnnnnnnnnnnnnnnnnnnnnnnnnnnnnnnnnnnnnnnnnnnnnnnnnnnnnnnnnnnnnnnnnnnnnnnnnnnnnnnnnnnnnnnnnnnnnnnnnnnnnnnnnnnnnnnnnnnnnnnnnnnnnnnnnnnnnnnnnnnnnnnnnnnnnnnnnnnnnnnnnnnnnnnnnnnnnnnnnnnnnnnnnnnnnnnnnnnnnnnnnnnnnnnnnnnnnnnnnnnnnnnnnnnnnnnnnnnnnnnnnnnnnnnnnnnnnnnnnnnnnnnnnnnnnnnnnnnnnnnnnnnnnnnnnnnnnnnnnnnnnnnnnnnnnnnnnnnnnnnnnnnnnnnnnnnnnnnnnnnnnnnnnnnnnnnnnnnnnnnnnnnnnnnnnnnnnnnnnnnnnnnnnnnnnnnnnnnnnnnnnnnnnnnnnnnnnnnnnnnnnnnnnnnnnnnnnnnnnnnnnnnnnnnnnnnnnnnnnnnnnnnnnnnnnnnnnnnnnnnnnnnnnnnnnnnnnnnnnnnnnnnnnnnnnnnnnnnnnnnnnnnnnnnnnnnnnnnnnnnnnnnnnnnnnnnnnnnnnnnnnnnnnnnnnnnnnnnnnnnnnnnnnnnnnnnnnnnnnnnnnnnnnnnnnnnnnnnnnnnnnnnnnnnnnnnnnnnnnnnnnnnnnnnnnnnnnnnnnnnnnnnnnnnnnnnnnnnnnnnnnnnnnnnnnnnnnnnnnnnnnnnnnnnnnnnnnnnnnnnnnnnnnnnnnnnnnnnnnnnnnnnnnnnnnnnnnnnnnnnnnnnnnnnnnnnnnnnnnnnnnnnnnnnnnnnnnnnnnnnnnnnnnnnnnnnnnnnnnnnnnnnnnnnnnnnnnnnnnnnnnnnnnnnnnnnnnnnnnnnnnnnnnnnnnnnnnnnnnnnnnnnnnnnnnnnnnnnnnnnnnnnnnnnnnnnnnnnnnnnnnnnnnnnnnnnnnnnnnnnnnnnnnnnnnnnnnnnnnnnnnnnnnnnnnnnnnnnnnnnnnnnnnnnnnnnnnnnnnnnnnnnnnnnnnnnnnnnnnnnnnnnnnnnnnnnnnnnnnnnnnnnnnnnnnnnnnnnnnnnnnnnnnnnnnnnnnnnnnnnnnnnnnnnnnnnnnnnnnnnnnnnnnnnnnnnnnnnnnnnnnnnnnnnnnnnnnnnnnnnnnnnnnnnnnnnnnnnnnnnnnnnnnnnnnnnnnnnnnnnnnnnnnnnnnnnnnnnnnnnnnnnnnnnnnnnnnnnnnnnnnnnnnnnnnnnnnnnnnnnnnnnnnnnnnnnnnnnnnnnnnnnnnnnnnnnnnnnnnnnnnnnnnnnnnnnnnnnnnnnnnnnnnnnnnnnnnnnnnnnnnnnnnnnnnnnnnnnnnnnnnnnnnnnnnnnnnnnnnnnnnnnnnnnnnnnnnnnnnnnnnnnnnnnnnnnnnnnnnnnnnnnnnnnnnnnnnnnnnnnnnnnnnnnnnnnnnnnnnnnnnnnnnnnnnnnnnnnnnnnnnnnnnnnnnnnnnnnnnnnnnnnnnnnnnnnnnnnnnnnnnnnnnnnnnnnnnnnnnnnnnnnnnnnnnnnnnnnnnnnnnnnnnnnnnnnnnnnnnnnnnnnnnnnnnnnnnnnnnnnnnnnnnnnnnnnnnnnnnnnnnnnnnnnnnnnnnnnnnnnnnnnnnnnnnnnnnnnnnnnnnnnnnnnnnnnnnnnnnnnnnnnnnnnnnnnnnnnnnnnnnnnnnnnnnnnnnnnnnnnnnnnnnnnnnnnnnnnnnnnnnnnnnnnnnnnnnnnnnnnnnnnnnnnnnnnnnnnnnnnnnnnnnnnnnnnnnnnnnnnnnnnnnnnnnnnnnnnnnnnnnnnnnnnnnnnnnnnnnnnnnnnnnnnnnnnnnnnnnnnnnnnnnnnnnnnnnnnnnnnnnnnnnnnnnnnnnnnnnnnnnnnnnnnnnnnnnnnnnnnnnnnnnnnnnnnnnnnnnnnnnnnnnnnnnnnnnnnnnnnnnnnnnnnnnnnnnnnnnnnnnnnnnnnnnnnnnnnnnnnnnnnnnnnnnnnnnnnnnnnnnnnnnnnnnnnnnnnnnnnnnnnnnnnnnnnnnnnnnnnnnnnnnnnnnnnnnnnnnnnnnnnnnnnnnnnnnnnnnnnnnnnnnnnnnnnnnnnnnnnnnnnnnnnnnnnnnnnnnnnnnnnnnnnnnnnnnnnnnnnnnnnnnnnnnnnnnnnnnnnnnnnnnnnnnnnnnnnnnnnnnnnnnnnnnnnnnnnnnnnnnnnnnnnnnnnnnnnnnnnnnnnnnnnnnnnnnnnnnnnnnnnnnnnnnnnnnnnnnnnnnnnnnnnnnnnnnnnnnnnnnnnnnnnnnnnnnnnnnnnnnnnnnnnnnnnnnnnnnnnnnnnnnnnnnnnnnnnnnnnnnnnnnnnnnnnnnnnnnnnnnnnnnnnnnnnnnnnnnnnnnnnnnnnnnnnnnnnnnnnnnnnnnnnnnnnnnnnnnnnnnnnnnnnnnnnnnnnnnnnnnnnnnnnnnnnnnnnnnnnnnnnnnnnnnnnnnnnnnnnnnnnnnnnnnnnnnnnnnnnnnnnnnnnnnnnnnnnnnnnnnnnnnnnnnnnnnnnnnnnnnnnnnnnnnnnnnnnnnnnnnnnnnnnnnnnnnnnnnnnnnnnnnnnnnnnnnnnnnnnnnnnnnnnnnnnnnnnnnnnnnnnnnnnnnnnnnnnnnnnnnnnnnnnnnnnnnnnnnnnnnnnnnnnnnnnnnnnnnnnnnnnnnnnnnnnnnnnnnnnnnnnnnnnnnnnnnnnnnnnnnnnnnnnnnnnnnnnnnnnnnnnnnnnnnnnnnnnnnnnnnnnnnnnnnnnnnnnnnnnnnnnnnnnnnnnnnnnnnnnnnnnnnnnnnnnnnnnnnnnnnnnnnnnnnnnnnnnnnnnnnnnnnnnnnnnnnnnnnnnnnnnnnnnnnnnnnnnnnnnnnnnnnnnnnnnnnnnnnnnnnnnnnnnnnnnnnnnnnnnnnnnnnnnnnnnnnnnnnnnnnnnnnnnnnnnnnnnnnnnnnnnnnnnnnnnnnnnnnnnnnnnnnnnnnnnnnnnnnnnnnnnnnnnnnnnnnnnnnnnnnnnnnnnnnnnnnnnnnnnnnnnnnnnnnnnnnnnnnnnnnnnnnnnnnnnnnnnnnnnnnnnnnnnnnnnnnnnnnnnnnnnnnnnnnnnnnnnnnnnnnnnnnnnnnnnnnnnnnnnnnnnnnnnnnnnnnnnnnnnnnnnnnnnnnnnnnnnnnnnnnnnnnnnnnnnnnnnnnnnnnnnnnnnnnnnnnnnnnnnnnnnnnnnnnnnnnnnnnnnnnnnnnnnnnnnnnnnnnnnnnnnnnnnnnnnnnnnnnnnnnnnnnnnnnnnnnnnnnnnnnnnnnnnnnnnnnnnnnnnnnnnnnnnnnnnnnnnnnnnnnnnnnnnnnnnnnnnnnnnnnnnnnnnnnnnnnnnnnnnnnnnnnnnnnnnnnnnnnnnnnnnnnnnnnnnnnnnnnnnnnnnnnnnnnnnnnnnnnnnnnnnnnnnnnnnnnnnnnnnnnnnnnnnnnnnnnnnnnnnnnnnnnnnnnnnnnnnnnnnnnnnnnnnnnnnnnnnnnnnnnnnnnnnnnnnnnnnnnnnnnnnnnnnnnnnnnnnnnnnnnnnnnnnnnnnnnnnnnnnnnnnnnnnnnnnnnnnnnnnnnnnnnnnnnnnnnnnnnnnnnnnnnnnnnnnnnnnnnnnnnnnnnnnnnnnnnnnnnnnnnnnnnnnnnnnnnnnnnnnnnnnnnnnnnnnnnnnnnnnnnnnnnnnnnnnnnnnnnnnnnnnnnnnnnnnnnnnnnnnnnnnnnnnnnnnnnnnnnnnnnnnnnnnnnnnnnnnnnnnnnnnnnnnnnnnnnnnnnnnnnnnnnnnnnnnnnnnnnnnnnnnnnnnnnnnnnnnnnnnnnnnnnnnnnnnnnnnnnnnnnnnnnnnnnnnnnnnnnnnnnnnnnnnnnnnnnnnnnnnnnnnnnnnnnnnnnnnnnnnnnnnnnnnnnnnnnnnnnnnnnnnnnnnnnnnnnnnnnnnnnnnnnnnnnnnnnnnnnnnnnnnnnnnnnnnnnnnnnnnnnnnnnnnnnnnnnnnnnnnnnnnnnnnnnnnnnnnnnnnnnnnnnnnnnnnnnnnnnnnnnnnnnnnnnnnnnnnnnnnnnnnnnnnnnnnnnnnnnnnnnnnnnnnnnnnnnnnnnnnnnnnnnnnnnnnnnnnnnnnnnnnnnnnnnnnnnnnnnnnnnnnnnnnnnnnnnnnnnnnnnnnnnnnnnnnnnnnnnnnnnnnnnnnnnnnnnnnnnnnnnnnnnnnnnnnnnnnnnnnnnnnnnnnnnnnnnnnnnnnnnnnnnnnnnnnnnnnnnnnnnnnnnnnnnnnnnnnnnnnnnnnnnnnnnnnnnnnnnnnnnnnnnnnnnnnnnnnnnnnnnnnnnnnnnnnnnnnnnnnnnnnnnnnnnnnnnnnnnnnnnnnnnnnnnnnnnnnnnnnnnnnnnnnnnnnnnnnnnnnnnnnnnnnnnnnnnnnnnnnnnnnnnnnnnnnnnnnnnnnnnnnnnnnnnnnnnnnnnnnnnnnnnnnnnnnnnnnnnnnnnnnnnnnnnnnnnnnnnnnnnnnnnnnnnnnnnnnnnnnnnnnnnnnnnnnnnnnnnnnnnnnnnnnnnnnnnnnnnnnnnnnnnnnnnnnnnnnnnnnnnnnnnnnnnnnnnnnnnnnnnnnnnnnnnnnnnnnnnnnnnnnnnnnnnnnnnnnnnnnnnnnnnnnnnnnnnnnnnnnnnnnnnnnnnnnnnnnnnnnnnnnnnnnnnnnnnnnnnnnnnnnnnnnnnnnnnnnnnnnnnnnnnnnnnnnnnnnnnnnnnnnnnnnnnnnnnnnnnnnnnnnnnnnnnnnnnnnnnnnnnnnnnnnnnnnnnnnnnnnnnnnnnnnnnnnnnnnnnnnnnnnnnnnnnnnnnnnnnnnnnnnnnnnnnnnnnnnnnnnnnnnnnnnnnnnnnnnnnnnnnnnnnnnnnnnnnnnnnnnnnnnnnnnnnnnnnnnnnnnnnnnnnnnnnnnnnnnnnnnnnnnnnnnnnnnnnnnnnnnnnnnnnnnnnnnnnnnnnnnnnnnnnnnnnnnnnnnnnnnnnnnnnnnnnnnnnnnnnnnnnnnnnnnnnnnnnnnnnnnnnnnnnnnnnnnnnnnnnnnnnnnnnnnnnnnnnnnnnnnnnnnnnnnnnnnnnnnnnnnnnnnnnnnnnnnnnnnnnnnnnnnnnnnnnnnnnnnnnnnnnnnnnnnnnnnnnnnnnnnnnnnnnnnnnnnnnnnnnnnnnnnnnnnnnnnnnnnnnnnnnnnnnnnnnnnnnnnnnnnnnnnnnnnnnnnnnnnnnnnnnnnnnnnnnnnnnnnnnnnnnnnnnnnnnnnnnnnnnnnnnnnnnnnnnnnnnnnnnnnnnnnnnnnnnnnnnnnnnnnnnnnnnnnnnnnnnnnnnnnnnnnnnnnnnnnnnnnnnnnnnnnnnnnnnnnnnnnnnnnnnnnnnnnnnnnnnnnnnnnnnnnnnnnnnnnnnnnnnnnnnnnnnnnnnnnnnnnnnnnnnnnnnnnnnnnnnnnnnnnnnnnnnnnnnnnnnnnnnnnnnnnnnnnnnnnnnnnnnnnnnnnnnnnnnnnnnnnnnnnnnnnnnnnnnnnnnnnnnnnnnnnnnnnnnnnnnnnnnnnnnnnnnnnnnnnnnnnnnnnnnnnnnnnnnnnnnnnnnnnnnnnnnnnnnnnnnnnnnnnnnnnnnnnnnnnnnnnnnnnnnnnnnnnnnnnnnnnnnnnnnnnnnnnnnnnnnnnnnnnnnnnnnnnnnnnnnnnnnnnnnnnnnnnnnnnnnnnnnnnnnnnnnnnnnnnnnnnnnnnnnnnnnnnnnnnnnnnnnnnnnnnnnnnnnnnnnnnnnnnnnnnnnnnnnnnnnnnnnnnnnnnnnnnnnnnnnnnnnnnnnnnnnnnnnnnnnnnnnnnnnnnnnnnnnnnnnnnnnnnnnnnnnnnnnnnnnnnnnnnnnnnnnnnnnnnnnnnnnnnnnnnnnnnnnnnnnnnnnnnnnnnnnnnnnnnnnnnnnnnnnnnnnnnnnnnnnnnnnnnnnnnnnnnnnnnnnnnnnnnnnnnnnnnnnnnnnnnnnnnnnnnnnnnnnnnnnnnnnnnnnnnnnnnnnnnnnnnnnnnnnnnnnnnnnnnnnnnnnnnnnnnnnnnnnnnnnnnnnnnnnnnnnnnnnnnnnnnnnnnnnnnnnnnnnnnnnnnnnnnnnnnnnnnnnnnnnnnnnnnnnnnnnnnnnnnnnnnnnnnnnnnnnnnnnnnnnnnnnnnnnnnnnnnnnnnnnnnnnnnnnnnnnnnnnnnnnnnnnnnnnnnnnnnnnnnnnnnnnnnnnnnnnnnnnnnnnnnnnnnnnnnnnnnnnnnnnnnnnnnnnnnnnnnnnnnnnnnnnnnnnnnnnnnnnnnnnnnnnnnnnnnnnnnnnnnnnnnnnnnnnnnnnnnnnnnnnnnnnnnnnnnnnnnnnnnnnnnnnnnnnnnnnnnnnnnnnnnnnnnnnnnnnnnnnnnnnnnnnnnnnnnnnnnnnnnnnnnnnnnnnnnnnnnnnnnnnnnnnnnnnnnnnnnnnnnnnnnnnnnnnnnnnnnnnnnnnnnnnnnnnnnnnnnnnnnnnnnnnnnnnnnnnnnnnnnnnnnnnnnnnnnnnnnnnnnnnnnnnnnnnnnnnnnnnnnnnnnnnnnnnnnnnnnnnnnnnnnnnnnnnnnnnnnnnnnnnnnnnnnnnnnnnnnnnnnnnnnnnnnnnnnnnnnnnnnnnnnnnnnnnnnnnnnnnnnnnnnnnnnnnnnnnnnnnnnnnnnnnnnnnnnnnnnnnnnnnnnnnnnnnnnnnnnnnnnnnnnnnnnnnnnnnnnnnnnnnnnnnnnnnnnnnnnnnnnnnnnnnnnnnnnnnnnnnnnnnnnnnnnnnnnnnnnnnnnnnnnnnnnnnnnnnnnnnnnnnnnnnnnnnnnnnnnnnnnnnnnnnnnnnnnnnnnnnnnnnnnnnnnnnnnnnnnnnnnnnnnnnnnnnnnnnnnnnnnnnnnnnnnnnnnnnnnnnnnnnnnnnnnnnnnnnnnnnnnnnnnnnnnnnnnnnnnnnnnnnnnnnnnnnnnnnnnnnnnnnnnnnnnnnnnnnnnnnnnnnnnnnnnnnnnnnnnnnnnnnnnnnnnnnnnnnnnnnnnnnnnnnnnnnnnnnnnnnnnnnnnnnnnnnnnnnnnnnnnnnnnnnnnnnnnnnnnnnnnnnnnnnnnnnnnnnnnnnnnnnnnnnnnnnnnnnnnnnnnnnnnnnnnnnnnnnnnnnnnnnnnnnnnnnnnnnnnnnnnnnnnnnnnnnnnnnnnnnnnnnnnnnnnnnnnnnnnnnnnnnnnnnnnnnnnnnnnnnnnnnnnnnnnnnnnnnnnnnnnnnnnnnnnnnnnnnnnnnnnnnnnnnnnnnnnnnnnnnnnnnnnnnnnnnnnnnnnnnnnnnnnnnnnnnnnnnnnnnnnnnnnnnnnnnnnnnnnnnnnnnnnnnnnnnnnnnnnnnnnnnnnnnnnnnnnnnnnnnnnnnnnnnnnnnnnnnnnnnnnnnnnnnnnnnnnnnnnnnnnnnnnnnnnnnnnnnnnnnnnnnnnnnnnnnnnnnnnnnnnnnnnnnnnnnnnnnnnnnnnnnnnnnnnnnnnnnnnnnnnnnnnnnnnnnnnnnnnnnnnnnnnnnnnnnnnnnnnnnnnnnnnnnnnnnnnnnnnnnnnnnnnnnnnnnnnnnnnnnnnnnnnnnnnnnnnnnnnnnnnnnnnnnnnnnnnnnnnnnnnnnnnnnnnnnnnnnnnnnnnnnnnnnnnnnnnnnnnnnnnnnnnnnnnnnnnnnnnnnnnnnnnnnnnnnnnnnnnnnnnnnnnnnnnnnnnnnnnnnnnnnnnnnnnnnnnnnnnnnnnnnnnnnnnnnnnnnnnnnnnnnnnnnnnnnnnnnnnnnnnnnnnnnnnnnnnnnnnnnnnnnnnnnnnnnnnnnnnnnnnnnnnnnnnnnnnnnnnnnnnnnnnnnnnnnnnnnnnnnnnnnnnnnnnnnnnnnnnnnnnnnnnnnnnnnnnnnnnnnnnnnnnnnnnnnnnnnnnnnnnnnnnnnnnnnnnnnnnnnnnnnnnnnnnnnnnnnnnnnnnnnnnnnnnnnnnnnnnnnnnnnnnnnnnnnnnnnnnnnnnnnnnnnnnnnnnnnnnnnnnnnnnnnnnnnnnnnnnnnnnnnnnnnnnnnnnnnnnnnnnnnnnnnnnnnnnnnnnnnnnnnnnnnnnnnnnnnnnnnnnnnnnnnnnnnnnnnnnnnnnnnnnnnnnnnnnnnnnnnnnnnnnnnnnnnnnnnnnnnnnnnnnnnnnnnnnnnnnnnnnnnnnnnnnnnnnnnnnnnnnnnnnnnnnnnnnnnnnnnnnnnnnnnnnnnnnnnnnnnnnnnnnnnnnnnnnnnnnnnnnnnnnnnnnnnnnnnnnnnnnnnnnnnnnnnnnnnnnnnnnnnnnnnnnnnnnnnnnnnnnnnnnnnnnnnnnnnnnnnnnnnnnnnnnnnnnnnnnnnnnnnnnnnnnnnnnnnnnnnnnnnnnnnnnnnnnnnnnnnnnnnnnnnnnnnnnnnnnnnnnnnnnnnnnnnnnnnnnnnnnnnnnnnnnnnnnnnnnnnnnnnnnnnnnnnnnnnnnnnnnnnnnnnnnnnnnnnnnnnnnnnnnnnnnnnnnnnnnnnnnnnnnnnnnnnnnnnnnnnnnnnnnnnnnnnnnnnnnnnnnnnnnnnnnnnnnnnnnnnnnnnnnnnnnnnnnnnnnnnnnnnnnnnnnnnnnnnnnnnnnnnnnnnnnnnnnnnnnnnnnnnnnnnnnnnnnnnnnnnnnnnnnnnnnnnnnnnnnnnnnnnnnnnnnnnnnnnnnnnnnnnnnnnnnnnnnnnnnnnnnnnnnnnnnnnnnnnnnnnnnnnnnnnnnnnnnnnnnnnnnnnnnnnnnnnnnnnnnnnnnnnnnnnnnnnnnnnnnnnnnnnnnnnnnnnnnnnnnnnnnnnnnnnnnnnnnnnnnnnnnnnnnnnnnnnnnnnnnnnnnnnnnnnnnnnnnnnnnnnnnnnnnnnnnnnnnnnnnnnnnnnnnnnnnnnnnnnnnnnnnnnnnnnnnnnnnnnnnnnnnnnnnnnnnnnnnnnnnnnnnnnnnnnnnnnnnnnnnnnnnnnnnnnnnnnnnnnnnnnnnnnnnnnnnnnnnnnnnnnnnnnnnnnnnnnnnnnnnnnnnnnnnnnnnnnnnnnnnnnnnnnnnnnnnnnnnnnnnnnnnnnnnnnnnnnnnnnnnnnnnnnnnnnnnnnnnnnnnnnnnnnnnnnnnnnnnnnnnnnnnnnnnnnnnnnnnnnnnnnnnnnnnnnnnnnnnnnnnnnnnnnnnnnnnnnnnnnnnnnnnnnnnnnnnnnnnnnnnnnnnnnnnnnnnnnnnnnnnnnnnnnnnnnnnnnnnnnnnnnnnnnnnnnnnnnnnnnnnnnnnnnnnnnnnnnnnnnnnnnnnnnnnnnnnnnnnnnnnnnnnnnnnnnnnnnnnnnnnnnnnnnnnnnnnnnnnnnnnnnnnnnnnnnnnnnnnnnnnnnnnnnnnnnnnnnnnnnnnnnnnnnnnnnnnnnnnnnnnnnnnnnnnnnnnnnnnnnnnnnnnnnnnnnnnnnnnnnnnnnnnnnnnnnnnnnnnnnnnnnnnnnnnnnnnnnnnnnnnnnnnnnnnnnnnnnnnnnnnnnnnnnnnnnnnnnnnnnnnnnnnnnnnnnnnnnnnnnnnnnnnnnnnnnnnnnnnnnnnnnnnnnnnnnnnnnnnnnnnnnnnnnnnnnnnnnnnnnnnnnnnnnnnnnnnnnnnnnnnnnnnnnnnnnnnnnnnnnnnnnnnnnnnnnnnnnnnnnnnnnnnnnnnnnnnnnnnnnnnnnnnnnnnnnnnnnnnnnnnnnnnnnnnnnnnnnnnnnnnnnnnnnnnnnnnnnnnnnnnnnnnnnnnnnnnnnnnnnnnnnnnnnnnnnnnnnnnnnnnnnnnnnnnnnnnnnnnnnnnnnnnnnnnnnnnnnnnnnnnnnnnnnnnnnnnnnnnnnnnnnnnnnnnnnnnnnnnnnnnnnnnnnnnnnnnnnnnnnnnnnnnnnnnnnnnnnnnnnnnnnnnnnnnnnnnnnnnnnnnnnnnnnnnnnnnnnnnnnnnnnnnnnnnnnnnnnnnnnnnnnnnnnnnnnnnnnnnnnnnnnnnnnnnnnnnnnnnnnnnnnnnnnnnnnnnnnnnnnnnnnnnnnnnnnnnnnnnnnnnnnnnnnnnnnnnnnnnnnnnnnnnnnnnnnnnnnnnnnnnnnnnnnnnnnnnnnnnnnnnnnnnnnnnnnnnnnnnnnnnnnnnnnnnnnnnnnnnnnnnnnnnnnnnnnnnnnnnnnnnnnnnnnnnnnnnnnnnnnnnnnnnnnnnnnnnnnnnnnnnnnnnnnnnnnnnnnnnnnnnnnnnnnnnnnnnnnnnnnnnnnnnnnnnnnnnnnnnnnnnnnnnnnnnnnnnnnnnnnnnnnnnnnnnnnnnnnnnnnnnnnnnnnnnnnnnnnnnnnnnnnnnnnnnnnnnnnnnnnnnnnnnnnnnnnnnnnnnnnnnnnnnnnnnnnnnnnnnnnnnnnnnnnnnnnnnnnnnnnnnnnnnnnnnnnnnnnnnnnnnnnnnnnnnnnnnnnnnnnnnnnnnnnnnnnnnnnnnnnnnnnnnnnnnnnnnnnnnnnnnnnnnnnnnnnnnnnnnnnnnnnnnnnnnnnnnnnnnnnnnnnnnnnnnnnnnnnnnnnnnnnnnnnnnnnnnnnnnnnnnnnnnnnnnnnnnnnnnnnnnnnnnnnnnnnnnnnnnnnnnnnnnnnnnnnnnnnnnnnnnnnnnnnnnnnnnnnnnnnnnnnnnnnnnnnnnnnnnnnnnnnnnnnnnnnnnnnnnnnnnnnnnnnnnnnnnnnnnnnnnnnnnnnnnnnnnnnnnnnnnnnnnnnnnnnnnnnnnnnnnnnnnnnnnnnnnnnnnnnnnnnnnnnnnnnnnnnnnnnnnnnnnnnnnnnnnnnnnnnnnnnnnnnnnnnnnnnnnnnnnnnnnnnnnnnnnnnnnnnnnnnnnnnnnnnnnnnnnnnnnnnnnnnnnnnnnnnnnnnnnnnnnnnnnnnnnnnnnnnnnnnnnnnnnnnnnnnnnnnnnnnnnnnnnnnnnnnnnnnnnnnnnnnnnnnnnnnnnnnnnnnnnnnnnnnnnnnnnnnnnnnnnnnnnnnnnnnnnnnnnnnnnnnnnnnnnnnnnnnnnnnnnnnnnnnnnnnnnnnnnnnnnnnnnnnnnnnnnnnnnnnnnnnnnnnnnnnnnnnnnnnnnnnnnnnnnnnnnnnnnnnnnnnnnnnnnnnnnnnnnnnnnnnnnnnnnnnnnnnnnnnnnnnnnnnnnnnnnnnnnnnnnnnnnnnnnnnnnnnnnnnnnnnnnnnnnnnnnnnnnnnnnnnnnnnnnnnnnnnnnnnnnnnnnnnnnnnnnnnnnnnnnnnnnnnnnnnnnnnnnnnnnnnnnnnnnnnnnnnnnnnnnnnnnnnnnnnnnnnnnnnnnnnnnnnnnnnnnnnnnnnnnnnnnnnnnnnnnnnnnnnnnnnnnnnnnnnnnnnnnnnnnnnnnnnnnnnnnnnnnnnnnnnnnnnnnnnnnnnnnnnnnnnnnnnnnnnnnnnnnnnnnnnnnnnnnnnnnnnnnnnnnnnnnnnnnnnnnnnnnnnnnnnnnnnnnnnnnnnnnnnnnnnnnnnnnnnnnnnnnnnnnnnnnnnnnnnnnnnnnnnnnnnnnnnnnnnnnnnnnnnnnnnnnnnnnnnnnnnnnnnnnnnnnnnnnnnnnnnnnnnnnnnnnnnnnnnnnnnnnnnnnnnnnnnnnnnnnnnnnnnnnnnnnnnnnnnnnnnnnnnnnnnnnnnnnnnnnnnnnnnnnnnnnnnnnnnnnnnnnnnnnnnnnnnnnnnnnnnnnnnnnnnnnnnnnnnnnnnnnnnnnnnnnnnnnnnnnnnnnnnnnnnnnnnnnnnnnnnnnnnnnnnnnnnnnnnnnnnnnnnnnnnnnnnnnnnnnnnnnnnnnnnnnnnnnnnnnnnnnnnnnnnnnnnnnnnnnnnnnnnnnnnnnnnnnnnnnnnnnnnnnnnnnnnnnnnnnnnnnnnnnnnnnnnnnnnnnnnnnnnnnnnnnnnnnnnnnnnnnnnnnnnnnnnnnnnnnnnnnnnnnnnnnnnnnnnnnnnnnnnnnnnnnnnnnnnnnnnnnnnnnnnnnnnnnnnnnnnnnnnnnnnnnnnnnnnnnnnnnnnnnnnnnnnnnnnnnnnnnnnnnnnnnnnnnnnnnnnnnnnnnnnnnnnnnnnnnnnnnnnnnnnnnnnnnnnnnnnnnnnnnnnnnnnnnnnnnnnnnnnnnnnnnnnnnnnnnnnnnnnnnnnnnnnnnnnnnnnnnnnnnnnnnnnnnnnnnnnnnnnnnnnnnnnnnnnnnnnnnnnnnnnnnnnnnnnnnnnnnnnnnnnnnnnnnnnnnnnnnnnnnnnnnnnnnnnnnnnnnnnnnnnnnnnnnnnnnnnnnnnnnnnnnnnnnnnnnnnnnnnnnnnnnnnnnnnnnnnnnnnnnnnnnnnnnnnnnnnnnnnnnnnnnnnnnnnnnnnnnnnnnnnnnnnnnnnnnnnnnnnnnnnnnnnnnnnnnnnnnnnnnnnnnnnnnnnnnnnnnnnnnnnnnnnnnnnnnnnnnnnnnnnnnnnnnnnnnnnnnnnnnnnnnnnnnnnnnnnnnnnnnnnnnnnnnnnnnnnnnnnnnnnnnnnnnnnnnnnnnnnnnnnnnnnnnnnnnnnnnnnnnnnnnnnnnnnnnnnnnnnnnnnnnnnnnnnnnnnnnnnnnnnnnnnnnnnnnnnnnnnnnnnnnnnnnnnnnnnnnnnnnnnnnnnnnnnnnnnnnnnnnnnnnnnnnnnnnnnnnnnnnnnnnnnnnnnnnnnnnnnnnnnnnnnnnnnnnnnnnnnnnnnnnnnnnnnnnnnnnnnnnnnnnnnnnnnnnnnnnnnnnnnnnnnnnnnnnnnnnnnnnnnnnnnnnnnnnnnnnnnnnnnnnnnnnnnnnnnnnnnnnnnnnnnnnnnnnnnnnnnnnnnnnnnnnnnnnnnnnnnnnnnnnnnnnnnnnnnnnnnnnnnnnnnnnnnnnnnnnnnnnnnnnnnnnnnnnnnnnnnnnnnnnnnnnnnnnnnnnnnnnnnnnnnnnnnnnnnnnnnnnnnnnnnnnnnnnnnnnnnnnnnnnnnnnnnnnnnnnnnnnnnnnnnnnnnnnnnnnnnnnnnnnnnnnnnnnnnnnnnnnnnnnnnnnnnnnnnnnnnnnnnnnnnnnnnnnnnnnnnnnnnnnnnnnnnnnnnnnnnnnnnnnnnnnnnnnnnnnnnnnnnnnnnnnnnnnnnnnnnnnnnnnnnnnnnnnnnnnnnnnnnnnnnnnnnnnnnnnnnnnnnnnnnnnnnnnnnnnnnnnnnnnnnnnnnnnnnnnnnnnnnnnnnnnnnnnnnnnnnnnnnnnnnnnnnnnnnnnnnnnnnnnnnnnnnnnnnnnnnnnnnnnnnnnnnnnnnnnnnnnnnnnnnnnnnnnnnnnnnnnnnnnnnnnnnnnnnnnnnnnnnnnnnnnnnnnnnnnnnnnnnnnnnnnnnnnnnnnnnnnnnnnnnnnnnnnnnnnnnnnnnnnnnnnnnnnnnnnnnnnnnnnnnnnnnnnnnnnnnnnnnnnnnnnnnnnnnnnnnnnnnnnnnnnnnnnnnnnnnnnnnnnnnnnnnnnnnnnnnnnnnnnnnnnnnnnnnnnnnnnnnnnnnnnnnnnnnnnnnnnnnnnnnnnnnnnnnnnnnnnnnnnnnnnnnnnnnnnnnnnnnnnnnnnnnnnnnnnnnnnnnnnnnnnnnnnnnnnnnnnnnnnnnnnnnnnnnnnnnnnnnnnnnnnnnnnnnnnnnnnnnnnnnnnnnnnnnnnnnnnnnnnnnnnnnnnnnnnnnnnnnnnnnnnnnnnnnnnnnnnnnnnnnnnnnnnnnnnnnnnnnnnnnnnnnnnnnnnnnnnnnnnnnnnnnnnnnnnnnnnnnnnnnnnnnnnnnnnnnnnnnnnnnnnnnnnnnnnnnnnnnnnnnnnnnnnnnnnnnnnnnnnnnnnnnnnnnnnnnnnnnnnnnnnnnnnnnnnnnnnnnnnnnnnnnnnnnnnnnnnnnnnnnnnnnnnnnnnnnnnnnnnnnnnnnnnnnnnnnnnnnnnnnnnnnnnnnnnnnnnnnnnnnnnnnnnnnnnnnnnnnnnnnnnnnnnnnnnnnnnnnnnnnnnnnnnnnnnnnnnnnnnnnnnnnnnnnnnnnnnnnnnnnnnnnnnnnnnnnnnnnnnnnnnnnnnnnnnnnnnnnnnnnnnnnnnnnnnnnnnnnnnnnnnnnnnnnnnnnnnnnnnnnnnnnnnnnnnnnnnnnnnnnnnnnnnnnnnnnnnnnnnnnnnnnnnnnnnnnnnnnnnnnnnnnnnnnnnnnnnnnnnnnnnnnnnnnnnnnnnnnnnnnnnnnnnnnnnnnnnnnnnnnnnnnnnnnnnnnnnnnnnnnnnnnnnnnnnnnnnnnnnnnnnnnnnnnnnnnnnnnnnnnnnnnnnnnnnnnnnnnnnnnnnnnnnnnnnnnnnnnnnnnnnnnnnnnnnnnnnnnnnnnnnnnnnnnnnnnnnnnnnnnnnnnnnnnnnnnnnnnnnnnnnnnnnnnnnnnnnnnnnnnnnnnnnnnnnnnnnnnnnnnnnnnnnnnnnnnnnnnnnnnnnnnnnnnnnnnnnnnnnnnnnnnnnnnnnnnnnnnnnnnnnnnnnnnnnnnnnnnnnnnnnnnnnnnnnnnnnnnnnnnnnnnnnnnnnnnnnnnnnnnnnnnnnnnnnnnnnnnnnnnnnnnnnnnnnnnnnnnnnnnnnnnnnnnnnnnnnnnnnnnnnnnnnnnnnnnnnnnnnnnnnnnnnnnnnnnnnnnnnnnnnnnnnnnnnnnnnnnnnnnnnnnnnnnnnnnnnnnnnnnnnnnnnnnnnnnnnnnnnnnnnnnnnnnnnnnnnnnnnnnnnnnnnnnnnnnnnnnnnnnnnnnnnnnnnnnnnnnnnnnnnnnnnnnnnnnnnnnnnnnnnnnnnnnnnnnnnnnnnnnnnnnnnnnnnnnnnnnnnnnnnnnnnnnnnnnnnnnnnnnnnnnnnnnnnnnnnnnnnnnnnnnnnnnnnnnnnnnnnnnnnnnnnnnnnnnnnnnnnnnnnnnnnnnnnnnnnnnnnnnnnnnnnnnnnnnnnnnnnnnnnnnnnnnnnnnnnnnnnnnnnnnnnnnnnnnnnnnnnnnnnnnnnnnnnnnnnnnnnnnnnnnnnnnnnnnnnnnnnnnnnnnnnnnnnnnnnnnnnnnnnnnnnnnnnnnnnnnnnnnnnnnnnnnnnnnnnnnnnnnnnnnnnnnnnnnnnnnnnnnnnnnnnnnnnnnnnnnnnnnnnnnnnnnnnnnnnnnnnnnnnnnnnnnnnnnnnnnnnnnnnnnnnnnnnnnnnnnnnnnnnnnnnnnnnnnnnnnnnnnnnnnnnnnnnnnnnnnnnnnnnnnnnnnnnnnnnnnnnnnnnnnnnnnnnnnnnnnnnnnnnnnnnnnnnnnnnnnnnnnnnnnnnnnnnnnnnnnnnnnnnnnnnnnnnnnnnnnnnnnnnnnnnnnnnnnnnnnnnnnnnnnnnnnnnnnnnnnnnnnnnnnnnnnnnnnnnnnnnnnnnnnnnnnnnnnnnnnnnnnnnnnnnnnnnnnnnnnnnnnnnnnnnnnnnnnnnnnnnnnnnnnnnnnnnnnnnnnnnnnnnnnnnnnnnnnnnnnnnnnnnnnnnnnnnnnnnnnnnnnnnnnnnnnnnnnnnnnnnnnnnnnnnnnnnnnnnnnnnnnnnnnnnnnnnnnnnnnnnnnnnnnnnnnnnnnnnnnnnnnnnnnnnnnnnnnnnnnnnnnnnnnnnnnnnnnnnnnnnnnnnnnnnnnnnnnnnnnnnnnnnnnnnnnnnnnnnnnnnnnnnnnnnnnnnnnnnnnnnnnnnnnnnnnnnnnnnnnnnnnnnnnnnnnnnnnnnnnnnnnnnnnnnnnnnnnnnnnnnnnnnnnnnnnnnnnnnnnnnnnnnnnnnnnnnnnnnnnnnnnnnnnnnnnnnnnnnnnnnnnnnnnnnnnnnnnnnnnnnnnnnnnnnnnnnnnnnnnnnnnnnnnnnnnnnnnnnnnnnnnnnnnnnnnnnnnnnnnnnnnnnnnnnnnnnnnnnnnnnnnnnnnnnnnnnnnnnnnnnnnnnnnnnnnnnnnnnnnnnnnnnnnnnnnnnnnnnnnnnnnnnnnnnnnnnnnnnnnnnnnnnnnnnnnnnnnnnnnnnnnnnnnnnnnnnnnnnnnnnnnnnnnnnnnnnnnnnnnnnnnnnnnnnnnnnnnnnnnnnnnnnnnnnnnnnnnnnnnnnnnnnnnnnnnnnnnnnnnnnnnnnnnnnnnnnnnnnnnnnnnnnnnnnnnnnnnnnnnnnnnnnnnnnnnnnnnnnnnnnnnnnnnnnnnnnnnnnnnnnnnnnnnnnnnnnnnnnnnnnnnnnnnnnnnnnnnnnnnnnnnnnnnnnnnnnnnnnnnnnnnnnnnnnnnnnnnnnnnnnnnnnnnnnnnnnnnnnnnnnnnnnnnnnnnnnnnnnnnnnnnnnnnnnnnnnnnnnnnnnnnnnnnnnnnnnnnnnnnnnnnnnnnnnnnnnnnnnnnnnnnnnnnnnnnnnnnnnnnnnnnnnnnnnnnnnnnnnnnnnnnnnnnnnnnnnnnnnnnnnnnnnnnnnnnnnnnnnnnnnnnnnnnnnnnnnnnnnnnnnnnnnnnnnnnnnnnnnnnnnnnnnnnnnnnnnnnnnnnnnnnnnnnnnnnnnnnnnnnnnnnnnnnnnnnnnnnnnnnnnnnnnnnnnnnnnnnnnnnnnnnnnnnnnnnnnnnnnnnnnnnnnnnnnnnnnnnnnnnnnnnnnnnnnnnnnnnnnnnnnnnnnnnnnnnnnnnnnnnnnnnnnnnnnnnnnnnnnnnnnnnnnnnnnnnnnnnnnnnnnnnnnnnnnnnnnnnnnnnnnnnnnnnnnnnnnnnnnnnnnnnnnnnnnnnnnnnnnnnnnnnnnnnnnnnnnnnnnnnnnnnnnnnnnnnnnnnnnnnnnnnnnnnnnnnnnnnnnnnnnnnnnnnnnnnnnnnnnnnnnnnnnnnnnnnnnnnnnnnnnnnnnnnnnnnnnnnnnnnnnnnnnnnnnnnnnnnnnnnnnnnnnnnnnnnnnnnnnnnnnnnnnnnnnnnnnnnnnnnnnnnnnnnnnnnnnnnnnnnnnnnnnnnnnnnnnnnnnnnnnnnnnnnnnnnnnnnnnnnnnnnnnnnnnnnnnnnnnnnnnnnnnnnnnnnnnnnnnnnnnnnnnnnnnnnnnnnnnnnnnnnnnnnnnnnnnnnnnnnnnnnnnnnnnnnnnnnnnnnnnnnnnnnnnnnnnnnnnnnnnnnnnnnnnnnnnnnnnnnnnnnnnnnnnnnnnnnnnnnnnnnnnnnnnnnnnnnnnnnnnnnnnnnnnnnnnnnnnnnnnnnnnnnnnnnnnnnnnnnnnnnnnnnnnnnnnnnnnnnnnnnnnnnnnnnnnnnnnnnnnnnnnnnnnnnnnnnnnnnnnnnnnnnnnnnnnnnnnnnnnnnnnnnnnnnnnnnnnnnnnnnnnnnnnnnnnnnnnnnnnnnnnnnnnnnnnnnnnnnnnnnnnnnnnnnnnnnnnnnnnnnnnnnnnnnnnnnnnnnnnnnnnnnnnnnnnnnnnnnnnnnnnnnnnnnnnnnnnnnnnnnnnnnnnnnnnnnnnnnnnnnnnnnnnnnnnnnnnnnnnnnnnnnnnnnnnnnnnnnnnnnnnnnnnnnnnnnnnnnnnnnnnnnnnnnnnnnnnnnnnnnnnnnnnnnnnnnnnnnnnnnnnnnnnnnnnnnnnnnnnnnnnnnnnnnnnnnnnnnnnnnnnnnnnnnnnnnnnnnnnnnnnnnnnnnnnnnnnnnnnnnnnnnnnnnnnnnnnnnnnnnnnnnnnnnnnnnnnnnnnnnnnnnnnnnnnnnnnnnnnnnnnnnnnnnnnnnnnnnnnnnnnnnnnnnnnnnnnnnnnnnnnnnnnnnnnnnnnnnnnnnnnnnnnnnnnnnnnnnnnnnnnnnnnnnnnnnnnnnnnnnnnnnnnnnnnnnnnnnnnnnnnnnnnnnnnnnnnnnnnnnnnnnnnnnnnnnnnnnnnnnnnnnnnnnnnnnnnnnnnnnnnnnnnnnnnnnnnnnnnnnnnnnnnnnnnnnnnnnnnnnnnnnnnnnnnnnnnnnnnnnnnnnnnnnnnnnnnnnnnnnnnnnnnnnnnnnnnnnnnnnnnnnnnnnnnnnnnnnnnnnnnnnnnnnnnnnnnnnnnnnnnnnnnnnnnnnnnnnnnnnnnnnnnnnnnnnnnnnnnnnnnnnnnnnnnnnnnnnnnnnnnnnnnnnnnnnnnnnnnnnnnnnnnnnnnnnnnnnnnnnnnnnnnnnnnnnnnnnnnnnnnnnnnnnnnnnnnnnnnnnnnnnnnnnnnnnnnnnnnnnnnnnnnnnnnnnnnnnnnnnnnnnnnnnnnnnnnnnnnnnnnnnnnnnnnnnnnnnnnnnnnnnnnnnnnnnnnnnnnnnnnnnnnnnnnnnnnnnnnnnnnnnnnnnnnnnnnnnnnnnnnnnnnnnnnnnnnnnnnnnnnnnnnnnnnnnnnnnnnnnnnnnnnnnnnnnnnnnnnnnnnnnnnnnnnnnnnnnnnnnnnnnnnnnnnnnnnnnnnnnnnnnnnnnnnnnnnnnnnnnnnnnnnnnnnnnnnnnnnnnnnnnnnnnnnnnnnnnnnnnnnnnnnnnnnnnnnnnnnnnnnnnnnnnnnnnnnnnnnnnnnnnnnnnnnnnnnnnnnnnnnnnnnnnnnnnnnnnnnnnnnnnnnnnnnnnnnnnnnnnnnnnnnnnnnnnnnnnnnnnnnnnnnnnnnnnnnnnnnnnnnnnnnnnnnnnnnnnnnnnnnnnnnnnnnnnnnnnnnnnnnnnnnnnnnnnnnnnnnnnnnnnnnnnnnnnnnnnnnnnnnnnnnnnnnnnnnnnnnnnnnnnnnnnnnnnnnnnnnnnnnnnnnnnnnnnnnnnnnnnnnnnnnnnnnnnnnnnnnnnnnnnnnnnnnnnnnnnnnnnnnnnnnnnnnnnnnnnnnnnnnnnnnnnnnnnnnnnnnnnnnnnnnnnnnnnnnnnnnnnnnnnnnnnnnnnnnnnnnnnnnnnnnnnnnnnnnnnnnnnnnnnnnnnnnnnnnnnnnnnnnnnnnnnnnnnnnnnnnnnnnnnnnnnnnnnnnnnnnnnnnnnnnnnnnnnnnnnnnnnnnnnnnnnnnnnnnnnnnnnnnnnnnnnnnnnnnnnnnnnnnnnnnnnnnnnnnnnnnnnnnnnnnnnnnnnnnnnnnnnnnnnnnnnnnnnnnnnnnnnnnnnnnnnnnnnnnnnnnnnnnnnnnnnnnnnnnnnnnnnnnnnnnnnnnnnnnnnnnnnnnnnnnnnnnnnnnnnnnnnnnnnnnnnnnnnnnnnnnnnnnnnnnnnnnnnnnnnnnnnnnnnnnnnnnnnnnnnnnnnnnnnnnnnnnnnnnnnnnnnnnnnnnnnnnnnnnnnnnnnnnnnnnnnnnnnnnnnnnnnnnnnnnnnnnnnnnnnnnnnnnnnnnnnnnnnnnnnnnnnnnnnnnnnnnnnnnnnnnnnnnnnnnnnnnnnnnnnnnnnnnnnnnnnnnnnnnnnnnnnnnnnnnnnnnnnnnnnnnnnnnnnnnnnnnnnnnnnnnnnnnnnnnnnnnnnnnnnnnnnnnnnnnnnnnnnnnnnnnnnnnnnnnnnnnnnnnnnnnnnnnnnnnnnnnnnnnnnnnnnnnnnnnnnnnnnnnnnnnnnnnnnnnnnnnnnnnnnnnnnnnnnnnnnnnnnnnnnnnnnnnnnnnnnnnnnnnnnnnnnnnnnnnnnnnnnnnnnnnnnnnnnnnnnnnnnnnnnnnnnnnnnnnnnnnnnnnnnnnnnnnnnnnnnnnnnnnnnnnnnnnnnnnnnnnnnnnnnnnnnnnnnnnnnnnnnnnnnnnnnnnnnnnnnnnnnnnnnnnnnnnnnnnnnnnnnnnnnnnnnnnnnnnnnnnnnnnnnnnnnnnnnnnnnnnnnnnnnnnnnnnnnnnnnnnnnnnnnnnnnnnnnnnnnnnnnnnnnnnnnnnnnnnnnnnnnnnnnnnnnnnnnnnnnnnnnnnnnnnnnnnnnnnnnnnnnnnnnnnnnnnnnnnnnnnnnnnnnnnnnnnnnnnnnnnnnnnnnnnnnnnnnnnnnnnnnnnnnnnnnnnnnnnnnnnnnnnnnnnnnnnnnnnnnnnnnnnnnnnnnnnnnnnnnnnnnnnnnnnnnnnnnnnnnnnnnnnnnnnnnnnnnnnnnnnnnnnnnnnnnnnnnnnnnnnnnnnnnnnnnnnnnnnnnnnnnnnnnnnnnnnnnnnnnnnnnnnnnnnnnnnnnnnnnnnnnnnnnnnnnnnnnnnnnnnnnnnnnnnnnnnnnnnnnnnnnnnnnnnnnnnnnnnnnnnnnnnnnnnnnnnnnnnnnnnnnnnnnnnnnnnnnnnnnnnnnnnnnnnnnnnnnnnnnnnnnnnnnnnnnnnnnnnnnnnnnnnnnnnnnnnnnnnnnnnnnnnnnnnnnnnnnnnnnnnnnnnnnnnnnnnnnnnnnnnnnnnnnnnnnnnnnnnnnnnnnnnnnnnnnnnnnnnnnnnnnnnnnnnnnnnnnnnnnnnnnnnnnnnnnnnnnnnnnnnnnnnnnnnnnnnnnnnnnnnnnnnnnnnnnnnnnnnnnnnnnnnnnnnnnnnnnnnnnnnnnnnnnnnnnnnnnnnnnnnnnnnnnnnnnnnnnnnnnnnnnnnnnnnnnnnnnnnnnnnnnnnnnnnnnnnnnnnnnnnnnnnnnnnnnnnnnnnnnnnnnnnnnnnnnnnnnnnnnnnnnnnnnnnnnnnnnnnnnnnnnnnnnnnnnnnnnnnnnnnnnnnnnnnnnnnnnnnnnnnnnnnnnnnnnnnnnnnnnnnnnnnnnnnnnnnnnnnnnnnnnnnnnnnnnnnnnnnnnnnnnnnnnnnnnnnnnnnnnnnnnnnnnnnnnnnnnnnnnnnnnnnnnnnnnnnnnnnnnnnnnnnnnnnnnnnnnnnnnnnnnnnnnnnnnnnnnnnnnnnnnnnnnnnnnnnnnnnnnnnnnnnnnnnnnnnnnnnnnnnnnnnnnnnnnnnnnnnnnnnnnnnnnnnnnnnnnnnnnnnnnnnnnnnnnnnnnnnnnnnnnnnnnnnnnnnnnnnnnnnnnnnnnnnnnnnnnnnnnnnnnnnnnnnnnnnnnnnnnnnnnnnnnnnnnnnnnnnnnnnnnnnnnnnnnnnnnnnnnnnnnnnnnnnnnnnnnnnnnnnnnnnnnnnnnnnnnnnnnnnnnnnnnnnnnnnnnnnnnnnnnnnnnnnnnnnnnnnnnnnnnnnnnnnnnnnnnnnnnnnnnnnnnnnnnnnnnnnnnnnnnnnnnnnnnnnnnnnnnnnnnnnnnnnnnnnnnnnnnnnnnnnnnnnnnnnnnnnnnnnnnnnnnnnnnnnnnnnnnnnnnnnnnnnnnnnnnnnnnnnnnnnnnnnnnnnnnnnnnnnnnnnnnnnnnnnnnnnnnnnnnnnnnnnnnnnnnnnnnnnnnnnnnnnnnnnnnnnnnnnnnnnnnnnnnnnnnnnnnnnnnnnnnnnnnnnnnnnnnnnnnnnnnnnnnnnnnnnnnnnnnnnnnnnnnnnnnnnnnnnnnnnnnnnnnnnnnnnnnnnnnnnnnnnnnnnnnnnnnnnnnnnnnnnnnnnnnnnnnnnnnnnnnnnnnnnnnnnnnnnnnnnnnnnnnnnnnnnnnnnnnnnnnnnnnnnnnnnnnnnnnnnnnnnnnnnnnnnnnnnnnnnnnnnnnnnnnnnnnnnnnnnnnnnnnnnnnnnnnnnnnnnnnnnnnnnnnnnnnnnnnnnnnnnnnnnnnnnnnnnnnnnnnnnnnnnnnnnnnnnnnnnnnnnnnnnnnnnnnnnnnnnnnnnnnnnnnnnnnnnnnnnnnnnnnnnnnnnnnnnnnnnnnnnnnnnnnnnnnnnnnnnnnnnnnnnnnnnnnnnnnnnnnnnnnnnnnnnnnnnnnnnnnnnnnnnnnnnnnnnnnnnnnnnnnnnnnnnnnnnnnnnnnnnnnnnnnnnnnnnnnnnnnnnnnnnnnnnnnnnnnnnnnnnnnnnnnnnnnnnnnnnnnnnnnnnnnnnnnnnnnnnnnnnnnnnnnnnnnnnnnnnnnnnnnnnnnnnnnnnnnnnnnnnnnnnnnnnnnnnnnnnnnnnnnnnnnnnnnnnnnnnnnnnnnnnnnnnnnnnnnnnnnnnnnnnnnnnnnnnnnnnnnnnnnnnnnnnnnnnnnnnnnnnnnnnnnnnnnnnnnnnnnnnnnnnnnnnnnnnnnnnnnnnnnnnnnnnnnnnnnnnnnnnnnnnnnnnnnnnnnnnnnnnnnnnnnnnnnnnnnnnnnnnnnnnnnnnnnnnnnnnnnnnnnnnnnnnnnnnnnnnnnnnnnnnnnnnnnnnnnnnnnnnnnnnnnnnnnnnnnnnnnnnnnnnnnnnnnnnnnnnnnnnnnnnnnnnnnnnnnnnnnnnnnnnnnnnnnnnnnnnnnnnnnnnnnnnnnnnnnnnnnnnnnnnnnnnnnnnnnnnnnnnnnnnnnnnnnnnnnnnnnnnnnnnnnnnnnnnnnnnnnnnnnnnnnnnnnnnnnnnnnnnnnnnnnnnnnnnnnnnnnnnnnnnnnnnnnnnnnnnnnnnnnnnnnnnnnnnnnnnnnnnnnnnnnnnnnnnnnnnnnnnnnnnnnnnnnnnnnnnnnnnnnnnnnnnnnnnnnnnnnnnnnnnnnnnnnnnnnnnnnnnnnnnnnnnnnnnnnnnnnnnnnnnnnnnnnnnnnnnnnnnnnnnnnnnnnnnnnnnnnnnnnnnnnnnnnnnnnnnnnnnnnnnnnnnnnnnnnnnnnnnnnnnnnnnnnnnnnnnnnnnnnnnnnnnnnnnnnnnnnnnnnnnnnnnnnnnnnnnnnnnnnnnnnnnnnnnnnnnnnnnnnnnnnnnnnnnnnnnnnnnnnnnnnnnnnnnnnnnnnnnnnnnnnnnnnnnnnnnnnnnnnnnnnnnnnnnnnnnnnnnnnnnnnnnnnnnnnnnnnnnnnnnnnnnnnnnnnnnnnnnnnnnnnnnnnnnnnnnnnnnnnnnnnnnnnnnnnnnnnnnnnnnnnnnnnnnnnnnnnnnnnnnnnnnnnnnnnnnnnnnnnnnnnnnnnnnnnnnnnnnnnnnnnnnnnnnnnnnnnnnnnnnnnnnnnnnnnnnnnnnnnnnnnnnnnnnnnnnnnnnnnnnnnnnnnnnnnnnnnnnnnnnnnnnnnnnnnnnnnnnnnnnnnnnnnnnnnnnnnnnnnnnnnnnnnnnnnnnnnnnnnnnnnnnnnnnnnnnnnnnnnnnnnnnnnnnnnnnnnnnnnnnnnnnnnnnnnnnnnnnnnnnnnnnnnnnnnnnnnnnnnnnnnnnnnnnnnnnnnnnnnnnnnnnnnnnnnnnnnnnnnnnnnnnnnnnnnnnnnnnnnnnnnnnnnnnnnnnnnnnnnnnnnnnnnnnnnnnnnnnnnnnnnnnnnnnnnnnnnnnnnnnnnnnnnnnnnnnnnnnnnnnnnnnnnnnnnnnnnnnnnnnnnnnnnnnnnnnnnnnnnnnnnnnnnnnnnnnnnnnnnnnnnnnnnnnnnnnnnnnnnnnnnnnnnnnnnnnnnnnnnnnnnnnnnnnnnnnnnnnnnnnnnnnnnnnnnnnnnnnnnnnnnnnnnnnnnnnnnnnnnnnnnnnnnnnnnnnnnnnnnnnnnnnnnnnnnnnnnnnnnnnnnnnnnnnnnnnnnnnnnnnnnnnnnnnnnnnnnnnnnnnnnnnnnnnnnnnnnnnnnnnnnnnnnnnnnnnnnnnnnnnnnnnnnnnnnnnnnnnnnnnnnnnnnnnnnnnnnnnnnnnnnnnnnnnnnnnnnnnnnnnnnnnnnnnnnnnnnnnnnnnnnnnnnnnnnnnnnnnnnnnnnnnnnnnnnnnnnnnnnnnnnnnnnnnnnnnnnnnnnnnnnnnnnnnnnnnnnnnnnnnnnnnnnnnnnnnnnnnnnnnnnnnnnnnnnnnnnnnnnnnnnnnnnnnnnnnnnnnnnnnnnnnnnnnnnnnnnnnnnnnnnnnnnnnnnnnnnnnnnnnnnnnnnnnnnnnnnnnnnnnnnnnnnnnnnnnnnnnnnnnnnnnnnnnnnnnnnnnnnnnnnnnnnnnnnnnnnnnnnnnnnnnnnnnnnnnnnnnnnnnnnnnnnnnnnnnnnnnnnnnnnnnnnnnnnnnnnnnnnnnnnnnnnnnnnnnnnnnnnnnnnnnnnnnnnnnnnnnnnnnnnnnnnnnnnnnnnnnnnnnnnnnnnnnnnnnnnnnnnnnnnnnnnnnnnnnnnnnnnnnnnnnnnnnnnnnnnnnnnnnnnnnnnnnnnnnnnnnnnnnnnnnnnnnnnnnnnnnnnnnnnnnnnnnnnnnnnnnnnnnnnnnnnnnnnnnnnnnnnnnnnnnnnnnnnnnnnnnnnnnnnnnnnnnnnnnnnnnnnnnnnnnnnnnnnnnnnnnnnnnnnnnnnnnnnnnnnnnnnnnnnnnnnnnnnnnnnnnnnnnnnnnnnnnnnnnnnnnnnnnnnnnnnnnnnnnnnnnnnnnnnnnnnnnnnnnnnnnnnnnnnnnnnnnnnnnnnnnnnnnnnnnnnnnnnnnnnnnnnnnnnnnnnnnnnnnnnnnnnnnnnnnnnnnnnnnnnnnnnnnnnnnnnnnnnnnnnnnnnnnnnnnnnnnnnnnnnnnnnnnnnnnnnnnnnnnnnnnnnnnnnnnnnnnnnnnnnnnnnnnnnnnnnnnnnnnnnnnnnnnnnnnnnnnnnnnnnnnnnnnnnnnnnnnnnnnnnnnnnnnnnnnnnnnnnnnnnnnnnnnnnnnnnnnnnnnnnnnnnnnnnnnnnnnnnnnnnnnnnnnnnnnnnnnnnnnnnnnnnnnnnnnnnnnnnnnnnnnnnnnnnnnnnnnnnnnnnnnnnnnnnnnnnnnnnnnnnnnnnnnnnnnnnnnnnnnnnnnnnnnnnnnnnnnnnnnnnnnnnnnnnnnnnnnnnnnnnnnnnnnnnnnnnnnnnnnnnnnnnnnnnnnnnnnnnnnnnnnnnnnnnnnnnnnnnnnnnnnnnnnnnnnnnnnnnnnnnnnnnnnnnnnnnnnnnnnnnnnnnnnnnnnnnnnnnnnnnnnnnnnnnnnnnnnnnnnnnnnnnnnnnnnnnnnnnnnnnnnnnnnnnnnnnnnnnnnnnnnnnnnnnnnnnnnnnnnnnnnnnnnnnnnnnnnnnnnnnnnnnnnnnnnnnnnnnnnnnnnnnnnnnnnnnnnnnnnnnnnnnnnnnnnnnnnnnnnnnnnnnnnnnnnnnnnnnnnnnnnnnnnnnnnnnnnnnnnnnnnnnnnnnnnnnnnnnnnnnnnnnnnnnnnnnnnnnnnnnnnnnnnnnnnnnnnnnnnnnnnnnnnnnnnnnnnnnnnnnnnnnnnnnnnnnnnnnnnnnnnnnnnnnnnnnnnnnnnnnnnnnnnnnnnnnnnnnnnnnnnnnnnnnnnnnnnnnnnnnnnnnnnnnnnnnnnnnnnnnnnnnnnnnnnnnnnnnnnnnnnnnnnnnnnnnnnnnnnnnnnnnnnnnnnnnnnnnnnnnnnnnnnnnnnnnnnnnnnnnnnnnnnnnnnnnnnnnnnnnnnnnnnnnnnnnnnnnnnnnnnnnnnnnnnnnnnnnnnnnnnnnnnnnnnnnnnnnnnnnnnnnnnnnnnnnnnnnnnnnnnnnnnnnnnnnnnnnnnnnnnnnnnnnnnnnnnnnnnnnnnnnnnnnnnnnnnnnnnnnnnnnnnnnnnnnnnnnnnnnnnnnnnnnnnnnnnnnnnnnnnnnnnnnnnnnnnnnnnnnnnnnnnnnnnnnnnnnnnnnnnnnnnnnnnnnnnnnnnnnnnnnnnnnnnnnnnnnnnnnnnnnnnnnnnnnnnnnnnnnnnnnnnnnnnnnnnnnnnnnnnnnnnnnnnnnnnnnnnnnnnnnnnnnnnnnnnnnnnnnnnnnnnnnnnnnnnnnnnnnnnnnnnnnnnnnnnnnnnnnnnnnnnnnnnnnnnnnnnnnnnnnnnnnnnnnnnnnnnnnnnnnnnnnnnnnnnnnnnnnnnnnnnnnnnnnnnnnnnnnnnnnnnnnnnnnnnnnnnnnnnnnnnnnnnnnnnnnnnnnnnnnnnnnnnnnnnnnnnnnnnnnnnnnnnnnnnnnnnnnnnnnnnnnnnnnnnnnnnnnnnnnnnnnnnnnnnnnnnnnnnnnnnnnnnnnnnnnnnnnnnnnnnnnnnnnnnnnnnnnnnnnnnnnnnnnnnnnnnnnnnnnnnnnnnnnnnnnnnnnnnnnnnnnnnnnnnnnnnnnnnnnnnnnnnnnnnnnnnnnnnnnnnnnnnnnnnnnnnnnnnnnnnnnnnnnnnnnnnnnnnnnnnnnnnnnnnnnnnnnnnnnnnnnnnnnnnnnnnnnnnnnnnnnnnnnnnnnnnnnnnnnnnnnnnnnnnnnnnnnnnnnnnnnnnnnnnnnnnnnnnnnnnnnnnnnnnnnnnnnnnnnnnnnnnnnnnnnnnnnnnnnnnnnnnnnnnnnnnnnnnnnnnnnnnnnnnnnnnnnnnnnnnnnnnnnnnnnnnnnnnnnnnnnnnnnnnnnnnnnnnnnnnnnnnnnnnnnnnnnnnnnnnnnnnnnnnnnnnnnnnnnnnnnnnnnnnnnnnnnnnnnnnnnnnnnnnnnnnnnnnnnnnnnnnnnnnnnnnnnnnnnnnnnnnnnnnnnnnnnnnnnnnnnnnnnnnnnnnnnnnnnnnnnnnnnnnnnnnnnnnnnnnnnnnnnnnnnnnnnnnnnnnnnnnnnnnnnnnnnnnnnnnnnnnnnnnnnnnnnnnnnnnnnnnnnnnnnnnnnnnnnnnnnnnnnnnnnnnnnnnnnnnnnnnnnnnnnnnnnnnnnnnnnnnnnnnnnnnnnnnnnnnnnnnnnnnnnnnnnnnnnnnnnnnnnnnnnnnnnnnnnnnnnnnnnnnnnnnnnnnnnnnnnnnnnnnnnnnnnnnnnnnnnnnnnnnnnnnnnnnnnnnnnnnnnnnnnnnnnnnnnnnnnnnnnnnnnnnnnnnnnnnnnnnnnnnnnnnnnnnnnnnnnnnnnnnnnnnnnnnnnnnnnnnnnnnnnnnnnnnnnnnnnnnnnnnnnnnnnnnnnnnnnnnnnnnnnnnnnnnnnnnnnnnnnnnnnnnnnnnnnnnnnnnnnnnnnnnnnnnnnnnnnnnnnnnnnnnnnnnnnnnnnnnnnnnnnnnnnnnnnnnnnnnnnnnnnnnnnnnnnnnnnnnnnnnnnnnnnnnnnnnnnnnnnnnnnnnnnnnnnnnnnnnnnnnnnnnnnnnnnnnnnnnnnnnnnnnnnnnnnnnnnnnnnnnnnnnnnnnnnnnnnnnnnnnnnnnnnnnnnnnnnnnnnnnnnnnnnnnnnnnnnnnnnnnnnnnnnnnnnnnnnnnnnnnnnnnnnnnnnnnnnnnnnnnnnnnnnnnnnnnnnnnnnnnnnnnnnnnnnnnnnnnnnnnnnnnnnnnnnnnnnnnnnnnnnnnnnnnnnnnnnnnnnnnnnnnnnnnnnnnnnnnnnnnnnnnnnnnnnnnnnnnnnnnnnnnnnnnnnnnnnnnnnnnnnnnnnnnnnnnnnnnnnnnnnnnnnnnnnnnnnnnnnnnnnnnnnnnnnnnnnnnnnnnnnnnnnnnnnnnnnnnnnnnnnnnnnnnnnnnnnnnnnnnnnnnnnnnnnnnnnnnnnnnnnnnnnnnnnnnnnnnnnnnnnnnnnnnnnnnnnnnnnnnnnnnnnnnnnnnnnnnnnnnnnnnnnnnnnnnnnnnnnnnnnnnnnnnnnnnnnnnnnnnnnnnnnnnnnnnnnnnnnnnnnnnnnnnnnnnnnnnnnnnnnnnnnnnnnnnnnnnnnnnnnnnnnnnnnnnnnnnnnnnnnnnnnnnnnnnnnnnnnnnnnnnnnnnnnnnnnnnnnnnnnnnnnnnnnnnnnnnnnnnnnnnnnnnnnnnnnnnnnnnnnnnnnnnnnnnnnnnnnnnnnnnnnnnnnnnnnnnnnnnnnnnnnnnnnnnnnnnnnnnnnnnnnnnnnnnnnnnnnnnnnnnnnnnnnnnnnnnnnnnnnnnnnnnnnnnnnnnnnnnnnnnnnnnnnnnnnnnnnnnnnnnnnnnnnnnnnnnnnnnnnnnnnnnnnnnnnnnnnnnnnnnnnnnnnnnnnnnnnnnnnnnnnnnnnnnnnnnnnnnnnnnnnnnnnnnnnnnnnnnnnnnnnnnnnnnnnnnnnnnnnnnnnnnnnnnnnnnnnnnnnnnnnnnnnnnnnnnnnnnnnnnnnnnnnnnnnnnnnnnnnnnnnnnnnnnnnnnnnnnnnnnnnnnnnnnnnnnnnnnnnnnnnnnnnnnnnnnnnnnnnnnnnnnnnnnnnnnnnnnnnnnnnnnnnnnnnnnnnnnnnnnnnnnnnnnnnnnnnnnnnnnnnnnnnnnnnnnnnnnnnnnnnnnnnnnnnnnnnnnnnnnnnnnnnnnnnnnnnnnnnnnnnnnnnnnnnnnnnnnnnnnnnnnnnnnnnnnnnnnnnnnnnnnnnnnnnnnnnnnnnnnnnnnnnnnnnnnnnnnnnnnnnnnnnnnnnnnnnnnnnnnnnnnnnnnnnnnnnnnnnnnnnnnnnnnnnnnnnnnnnnnnnnnnnnnnnnnnnnnnnnnnnnnnnnnnnnnnnnnnnnnnnnnnnnnnnnnnnnnnnnnnnnnnnnnnnnnnnnnnnnnnnnnnnnnnnnnnnnnnnnnnnnnnnnnnnnnnnnnnnnnnnnnnnnnnnnnnnnnnnnnnnnnnnnnnnnnnnnnnnnnnnnnnnnnnnnnnnnnnnnnnnnnnnnnnnnnnnnnnnnnnnnnnnnnnnnnnnnnnnnnnnnnnnnnnnnnnnnnnnnnnnnnnnnnnnnnnnnnnnnnnnnnnnnnnnnnnnnnnnnnnnnnnnnnnnnnnnnnnnnnnnnnnnnnnnnnnnnnnnnnnnnnnnnnnnnnnnnnnnnnnnnnnnnnnnnnnnnnnnnnnnnnnnnnnnnnnnnnnnnnnnnnnnnnnnnnnnnnnnnnnnnnnnnnnnnnnnnnnnnnnnnnnnnnnnnnnnnnnnnnnnnnnnnnnnnnnnnnnnnnnnnnnnnnnnnnnnnnnnnnnnnnnnnnnnnnnnnnnnnnnnnnnnnnnnnnnnnnnnnnnnnnnnnnnnnnnnnnnnnnnnnnnnnnnnnnnnnnnnnnnnnnnnnnnnnnnnnnnnnnnnnnnnnnnnnnnnnnnnnnnnnnnnnnnnnnnnnnnnnnnnnnnnnnnnnnnnnnnnnnnnnnnnnnnnnnnnnnnnnnnnnnnnnnnnnnnnnnnnnnnnnnnnnnnnnnnnnnnnnnnnnnnnnnnnnnnnnnnnnnnnnnnnnnnnnnnnnnnnnnnnnnnnnnnnnnnnnnnnnnnnnnnnnnnnnnnnnnnnnnnnnnnnnnnnnnnnnnnnnnnnnnnnnnnnnnnnnnnnnnnnnnnnnnnnnnnnnnnnnnnnnnnnnnnnnnnnnnnnnnnnnnnnnnnnnnnnnnnnnnnnnnnnnnnnnnnnnnnnnnnnnnnnnnnnnnnnnnnnnnnnnnnnnnnnnnnnnnnnnnnnnnnnnnnnnnnnnnnnnnnnnnnnnnnnnnnnnnnnnnnnnnnnnnnnnnnnnnnnnnnnnnnnnnnnnnnnnnnnnnnnnnnnnnnnnnnnnnnnnnnnnnnnnnnnnnnnnnnnnnnnnnnnnnnnnnnnnnnnnnnnnnnnnnnnnnnnnnnnnnnnnnnnnnnnnnnnnnnnnnnnnnnnnnnnnnnnnnnnnnnnnnnnnnnnnnnnnnnnnnnnnnnnnnnnnnnnnnnnnnnnnnnnnnnnnnnnnnnnnnnnnnnnnnnnnnnnnnnnnnnnnnnnnnnnnnnnnnnnnnnnnnnnnnnnnnnnnnnnnnnnnnnnnnnnnnnnnnnnnnnnnnnnnnnnnnnnnnnnnnnnnnnnnnnnnnnnnnnnnnnnnnnnnnnnnnnnnnnnnnnnnnnnnnnnnnnnnnnnnnnnnnnnnnnnnnnnnnnnnnnnnnnnnnnnnnnnnnnnnnnnnnnnnnnnnnnnnnnnnnnnnnnnnnnnnnnnnnnnnnnnnnnnnnnnnnnnnnnnnnnnnnnnnnnnnnnnnnnnnnnnnnnnnnnnnnnnnnnnnnnnnnnnnnnnnnnnnnnnnnnnnnnnnnnnnnnnnnnnnnnnnnnnnnnnnnnnnnnnnnnnnnnnnnnnnnnnnnnnnnnnnnnnnnnnnnnnnnnnnnnnnnnnnnnnnnnnnnnnnnnnnnnnnnnnnnnnnnnnnnnnnnnnnnnnnnnnnnnnnnnnnnnnnnnnnnnnnnnnnnnnnnnnnnnnnnnnnnnnnnnnnnnnnnnnnnnnnnnnnnnnnnnnnnnnnnnnnnnnnnnnnnnnnnnnnnnnnnnnnnnnnnnnnnnnnnnnnnnnnnnnnnnnnnnnnnnnnnnnnnnnnnnnnnnnnnnnnnnnnnnnnnnnnnnnnnnnnnnnnnnnnnnnnnnnnnnnnnnnnnnnnnnnnnnnnnnnnnnnnnnnnnnnnnnnnnnnnnnnnnnnnnnnnnnnnnnnnnnnnnnnnnnnnnnnnnnnnnnnnnnnnnnnnnnnnnnnnnnnnnnnnnnnnnnnnnnnnnnnnnnnnnnnnnnnnnnnnnnnnnnnnnnnnnnnnnnnnnnnnnnnnnnnnnnnnnnnnnnnnnnnnnnnnnnnnnnnnnnnnnnnnnnnnnnnnnnnnnnnnnnnnnnnnnnnnnnnnnnnnnnnnnnnnnnnnnnnnnnnnnnnnnnnnnnnnnnnnnnnnnnnnnnnnnnnnnnnnnnnnnnnnnnnnnnnnnnnnnnnnnnnnnnnnnnnnnnnnnnnnnnnnnnnnnnnnnnnnnnnnnnnnnnnnnnnnnnnnnnnnnnnnnnnnnnnnnnnnnnnnnnnnnnnnnnnnnnnnnnnnnnnnnnnnnnnnnnnnnnnnnnnnnnnnnnnnnnnnnnnnnnnnnnnnnnnnnnnnnnnnnnnnnnnnnnnnnnnnnnnnnnnnnnnnnnnnnnnnnnnnnnnnnnnnnnnnnnnnnnnnnnnnnnnnnnnnnnnnnnnnnnnnnnnnnnnnnnnnnnnnnnnnnnnnnnnnnnnnnnnnnnnnnnnnnnnnnnnnnnnnnnnnnnnnnnnnnnnnnnnnnnnnnnnnnnnnnnnnnnnnnnnnnnnnnnnnnnnnnnnnnnnnnnnnnnnnnnnnnnnnnnnnnnnnnnnnnnnnnnnnnnnnnnnnnnnnnnnnnnnnnnnnnnnnnnnnnnnnnnnnnnnnnnnnnnnnnnnnnnnnnnnnnnnnnnnnnnnnnnnnnnnnnnnnnnnnnnnnnnnnnnnnnnnnnnnnnnnnnnnnnnnnnnnnnnnnnnnnnnnnnnnnnnnnnnnnnnnnnnnnnnnnnnnnnnnnnnnnnnnnnnnnnnnnnnnnnnnnnnnnnnnnnnnnnnnnnnnnnnnnnnnnnnnnnnnnnnnnnnnnnnnnnnnnnnnnnnnnnnnnnnnnnnnnnnnnnnnnnnnnnnnnnnnnnnnnnnnnnnnnnnnnnnnnnnnnnnnnnnnnnnnnnnnnnnnnnnnnnnnnnnnnnnnnnnnnnnnnnnnnnnnnnnnnnnnnnnnnnnnnnnnnnnnnnnnnnnnnnnnnnnnnnnnnnnnnnnnnnnnnnnnnnnnnnnnnnnnnnnnnnnnnnnnnnnnnnnnnnnnnnnnnnnnnnnnnnnnnnnnnnnnnnnnnnnnnnnnnnnnnnnnnnnnnnnnnnnnnnnnnnnnnnnnnnnnnnnnnnnnnnnnnnnnnnnnnnnnnnnnnnnnnnnnnnnnnnnnnnnnnnnnnnnnnnnnnnnnnnnnnnnnnnnnnnnnnnnnnnnnnnnnnnnnnnnnnnnnnnnnnnnnnnnnnnnnnnnnnnnnnnnnnnnnnnnnnnnnnnnnnnnnnnnnnnnnnnnnnnnnnnnnnnnnnnnnnnnnnnnnnnnnnnnnnnnnnnnnnnnnnnnnnnnnnnnnnnnnnnnnnnnnnnnnnnnnnnnnnnnnnnnnnnnnnnnnnnnnnnnnnnnnnnnnnnnnnnnnnnnnnnnnnnnnnnnnnnnnnnnnnnnnnnnnnnnnnnnnnnnnnnnnnnnnnnnnnnnnnnnnnnnnnnnnnnnnnnnnnnnnnnnnnnnnnnnnnnnnnnnnnnnnnnnnnnnnnnnnnnnnnnnnnnnnnnnnnnnnnnnnnnnnnnnnnnnnnnnnnnnnnnnnnnnnnnnnnnnnnnnnnnnnnnnnnnnnnnnnnnnnnnnnnnnnnnnnnnnnnnnnnnnnnnnnnnnnnnnnnnnnnnnnnnnnnnnnnnnnnnnnnnnnnnnnnnnnnnnnnnnnnnnnnnnnnnnnnnnnnnnnnnnnnnnnnnnnnnnnnnnnnnnnnnnnnnnnnnnnnnnnnnnnnnnnnnnnnnnnnnnnnnnnnnnnnnnnnnnnnnnnnnnnnnnnnnnnnnnnnnnnnnnnnnnnnnnnnnnnnnnnnnnnnnnnnnnnnnnnnnnnnnnnnnnnnnnnnnnnnnnnnnnnnnnnnnnnnnnnnnnnnnnnnnnnnnnnnnnnnnnnnnnnnnnnnnnnnnnnnnnnnnnnnnnnnnnnnnnnnnnnnnnnnnnnnnnnnnnnnnnnnnnnnnnnnnnnnnnnnnnnnnnnnnnnnnnnnnnnnnnnnnnnnnnnnnnnnnnnnnnnnnnnnnnnnnnnnnnnnnnnnnnnnnnnnnnnnnnnnnnnnnnnnnnnnnnnnnnnnnnnnnnnnnnnnnnnnnnnnnnnnnnnnnnnnnnnnnnnnnnnnnnnnnnnnnnnnnnnnnnnnnnnnnnnnnnnnnnnnnnnnnnnnnnnnnnnnnnnnnnnnnnnnnnnnnnnnnnnnnnnnnnnnnnnnnnnnnnnnnnnnnnnnnnnnnnnnnnnnnnnnnnnnnnnnnnnnnnnnnnnnnnnnnnnnnnnnnnnnnnnnnnnnnnnnnnnnnnnnnnnnnnnnnnnnnnnnnnnnnnnnnnnnnnnnnnnnnnnnnnnnnnnnnnnnnnnnnnnnnnnnnnnnnnnnnnnnnnnnnnnnnnnnnnnnnnnnnnnnnnnnnnnnnnnnnnnnnnnnnnnnnnnnnnnnnnnnnnnnnnnnnnnnnnnnnnnnnnnnnnnnnnnnnnnnnnnnnnnnnnnnnnnnnnnnnnnnnnnnnnnnnnnnnnnnnnnnnnnnnnnnnnnnnnnnnnnnnnnnnnnnnnnnnnnnnnnnnnnnnnnnnnnnnnnnnnnnnnnnnnnnnnnnnnnnnnnnnnnnnnnnnnnnnnnnnnnnnnnnnnnnnnnnnnnnnnnnnnnnnnnnnnnnnnnnnnnnnnnnnnnnnnnnnnnnnnnnnnnnnnnnnnnnnnnnnnnnnnnnnnnnnnnnnnnnnnnnnnnnnnnnnnnnnnnnnnnnnnnnnnnnnnnnnnnnnnnnnnnnnnnnnnnnnnnnnnnnnnnnnnnnnnnnnnnnnnnnnnnnnnnnnnnnnnnnnnnnnnnnnnnnnnnnnnnnnnnnnnnnnnnnnnnnnnnnnnnnnnnnnnnnnnnnnnnnnnnnnnnnnnnnnnnnnnnnnnnnnnnnnnnnnnnnnnnnnnnnnnnnnnnnnnnnnnnnnnnnnnnnnnnnnnnnnnnnnnnnnnnnnnnnnnnnnnnnnnnnnnnnnnnnnnnnnnnnnnnnnnnnnnnnnnnnnnnnnnnnnnnnnnnnnnnnnnnnnnnnnnnnnnnnnnnnnnnnnnnnnnnnnnnnnnnnnnnnnnnnnnnnnnnnnnnnnnnnnnnnnnnnnnnnnnnnnnnnnnnnnnnnnnnnnnnnnnnnnnnnnnnnnnnnnnnnnnnnnnnnnnnnnnnnnnnnnnnnnnnnnnnnnnnnnnnnnnnnnnnnnnnnnnnnnnnnnnnnnnnnnnnnnnnnnnnnnnnnnnnnnnnnnnnnnnnnnnnnnnnnnnnnnnnnnnnnnnnnnnnnnnnnnnnnnnnnnnnnnnnnnnnnnnnnnnnnnnnnnnnnnnnnnnnnnnnnnnnnnnnnnnnnnnnnnnnnnnnnnnnnnnnnnnnnnnnnnnnnnnnnnnnnnnnnnnnnnnnnnnnnnnnnnnnnnnnnnnnnnnnnnnnnnnnnnnnnnnnnnnnnnnnnnnnnnnnnnnnnnnnnnnnnnnnnnnnnnnnnnnnnnnnnnnnnnnnnnnnnnnnnnnnnnnnnnnnnnnnnnnnnnnnnnnnnnnnnnnnnnnnnnnnnnnnnnnnnnnnnnnnnnnnnnnnnnnnnnnnnnnnnnnnnnnnnnnnnnnnnnnnnnnnnnnnnnnnnnnnnnnnnnnnnnnnnnnnnnnnnnnnnnnnnnnnnnnnnnnnnnnnnnnnnnnnnnnnnnnnnnnnnnnnnnnnnnnnnnnnnnnnnnnnnnnnnnnnnnnnnnnnnnnnnnnnnnnnnnnnnnnnnnnnnnnnnnnnnnnnnnnnnnnnnnnnnnnnnnnnnnnnnnnnnnnnnnnnnnnnnnnnnnnnnnnnnnnnnnnnnnnnnnnnnnnnnnnnnnnnnnnnnnnnnnnnnnnnnnnnnnnnnnnnnnnnnnnnnnnnnnnnnnnnnnnnnnnnnnnnnnnnnnnnnnnnnnnnnnnnnnnnnnnnnnnnnnnnnnnnnnnnnnnnnnnnnnnnnnnnnnnnnnnnnnnnnnnnnnnnnnnnnnnnnnnnnnnnnnnnnnnnnnnnnnnnnnnnnnnnnnnnnnnnnnnnnnnnnnnnnnnnnnnnnnnnnnnnnnnnnnnnnnnnnnnnnnnnnnnnnnnnnnnnnnnnnnnnnnnnnnnnnnnnnnnnnnnnnnnnnnnnnnnnnnnnnnnnnnnnnnnnnnnnnnnnnnnnnnnnnnnnnnnnnnnnnnnnnnnnnnnnnnnnnnnnnnnnnnnnnnnnnnnnnnnnnnnnnnnnnnnnnnnnnnnnnnnnnnnnnnnnnnnnnnnnnnnnnnnnnnnnnnnnnnnnnnnnnnnnnnnnnnnnnnnnnnnnnnnnnnnnnnnnnnnnnnnnnnnnnnnnnnnnnnnnnnnnnnnnnnnnnnnnnnnnnnnnnnnnnnnnnnnnnnnnnnnnnnnnnnnnnnnnnnnnnnnnnnnnnnnnnnnnnnnnnnnnnnnnnnnnnnnnnnnnnnnnnnnnnnnnnnnnnnnnnnnnnnnnnnnnnnnnnnnnnnnnnnnnnnnnnnnnnnnnnnnnnnnnnnnnnnnnnnnnnnnnnnnnnnnnnnnnnnnnnnnnnnnnnnnnnnnnnnnnnnnnnnnnnnnnnnnnnnnnnnnnnnnnnnnnnnnnnnnnnnnnnnnnnnnnnnnnnnnnnnnnnnnnnnnnnnnnnnnnnnnnnnnnnnnnnnnnnnnnnnnnnnnnnnnnnnnnnnnnnnnnnnnnnnnnnnnnnnnnnnnnnnnnnnnnnnnnnnnnnnnnnnnnnnnnnnnnnnnnnnnnnnnnnnnnnnnnnnnnnnnnnnnnnnnnnnnnnnnnnnnnnnnnnnnnnnnnnnnnnnnnnnnnnnnnnnnnnnnnnnnnnnnnnnnnnnnnnnnnnnnnnnnnnnnnnnnnnnnnnnnnnnnnnnnnnnnnnnnnnnnnnnnnnnnnnnnnnnnnnnnnnnnnnnnnnnnnnnnnnnnnnnnnnnnnnnnnnnnnnnnnnnnnnnnnnnnnnnnnnnnnnnnnnnnnnnnnnnnnnnnnnnnnnnnnnnnnnnnnnnnnnnnnnnnnnnnnnnnnnnnnnnnnnnnnnnnnnnnnnnnnnnnnnnnnnnnnnnnnnnnnnnnnnnnnnnnnnnnnnnnnnnnnnnnnnnnnnnnnnnnnnnnnnnnnnnnnnnnnnnnnnnnnnnnnnnnnnnnnnnnnnnnnnnnnnnnnnnnnnnnnnnnnnnnnnnnnnnnnnnnnnnnnnnnnnnnnnnnnnnnnnnnnnnnnnnnnnnnnnnnnnnnnnnnnnnnnnnnnnnnnnnnnnnnnnnnnnnnnnnnnnnnnnnnnnnnnnnnnnnnnnnnnnnnnnnnnnnnnnnnnnnnnnnnnnnnnnnnnnnnnnnnnnnnnnnnnnnnnnnnnnnnnnnnnnnnnnnnnnnnnnnnnnnnnnnnnnnnnnnnnnnnnnnnnnnnnnnnnnnnnnnnnnnnnnnnnnnnnnnnnnnnnnnnnnnnnnnnnnnnnnnnnnnnnnnnnnnnnnnnnnnnnnnnnnnnnnnnnnnnnnnnnnnnnnnnnnnnnnnnnnnnnnnnnnnnnnnnnnnnnnnnnnnnnnnnnnnnnnnnnnnnnnnnnnnnnnnnnnnnnnnnnnnnnnnnnnnnnnnnnnnnnnnnnnnnnnnnnnnnnnnnnnnnnnnnnnnnnnnnnnnnnnnnnnnnnnnnnnnnnnnnnnnnnnnnnnnnnnnnnnnnnnnnnnnnnnnnnnnnnnnnnnnnnnnnnnnnnnnnnnnnnnnnnnnnnnnnnnnnnnnnnnnnnnnnnnnnnnnnnnnnnnnnnnnnnnnnnnnnnnnnnnnnnnnnnnnnnnnnnnnnnnnnnnnnnnnnnnnnnnnnnnnnnnnnnnnnnnnnnnnnnnnnnnnnnnnnnnnnnnnnnnnnnnnnnnnnnnnnnnnnnnnnnnnnnnnnnnnnnnnnnnnnnnnnnnnnnnnnnnnnnnnnnnnnnnnnnnnnnnnnnnnnnnnnnnnnnnnnnnnnnnnnnnnnnnnnnnnnnnnnnnnnnnnnnnnnnnnnnnnnnnnnnnnnnnnnnnnnnnnnnnnnnnnnnnnnnnnnnnnnnnnnnnnnnnnnnnnnnnnnnnnnnnnnnnnnnnnnnnnnnnnnnnnnnnnnnnnnnnnnnnnnnnnnnnnnnnnnnnnnnnnnnnnnnnnnnnnnnnnnnnnnnnnnnnnnnnnnnnnnnnnnnnnnnnnnnnnnnnnnnnnnnnnnnnnnnnnnnnnnnnnnnnnnnnnnnnnnnnnnnnnnnnnnnnnnnnnnnnnnnnnnnnnnnnnnnnnnnnnnnnnnnnnnnnnnnnnnnnnnnnnnnnnnnnnnnnnnnnnnnnnnnnnnnnnnnnnnnnnnnnnnnnnnnnnnnnnnnnnnnnnnnnnnnnnnnnnnnnnnnnnnnnnnnnnnnnnnnnnnnnnnnnnnnnnnnnnnnnnnnnnnnnnnnnnnnnnnnnnnnnnnnnnnnnnnnnnnnnnnnnnnnnnnnnnnnnnnnnnnnnnnnnnnnnnnnnnnnnnnnnnnnnnnnnnnnnnnnnnnnnnnnnnnnnnnnnnnnnnnnnnnnnnnnnnnnnnnnnnnnnnnnnnnnnnnnnnnnnnnnnnnnnnnnnnnnnnnnnnnnnnnnnnnnnnnnnnnnnnnnnnnnnnnnnnnnnnnnnnnnnnnnnnnnnnnnnnnnnnnnnnnnnnnnnnnnnnnnnnnnnnnnnnnnnnnnnnnnnnnnnnnnnnnnnnnnnnnnnnnnnnnnnnnnnnnnnnnnnnnnnnnnnnnnnnnnnnnnnnnnnnnnnnnnnnnnnnnnnnnnnnnnnnnnnnnnnnnnnnnnnnnnnnnnnnnnnnnnnnnnnnnnnnnnnnnnnnnnnnnnnnnnnnnnnnnnnnnnnnnnnnnnnnnnnnnnnnnnnnnnnnnnnnnnnnnnnnnnnnnnnnnnnnnnnnnnnnnnnnnnnnnnnnnnnnnnnnnnnnnnnnnnnnnnnnnnnnnnnnnnnnnnnnnnnnnnnnnnnnnnnnnnnnnnnnnnnnnnnnnnnnnnnnnnnnnnnnnnnnnnnnnnnnnnnnnnnnnnnnnnnnnnnnnnnnnnnnnnnnnnnnnnnnnnnnnnnnnnnnnnnnnnnnnnnnnnnnnnnnnnnnnnnnnnnnnnnnnnnnnnnnnnnnnnnnnnnnnnnnnnnnnnnnnnnnnnnnnnnnnnnnnnnnnnnnnnnnnnnnnnnnnnnnnnnnnnnnnnnnnnnnnnnnnnnnnnnnnnnnnnnnnnnnnnnnnnnnnnnnnnnnnnnnnnnnnnnnnnnnnnnnnnnnnnnnnnnnnnnnnnnnnnnnnnnnnnnnnnnnnnnnnnnnnnnnnnnnnnnnnnnnnnnnnnnnnnnnnnnnnnnnnnnnnnnnnnnnnnnnnnnnnnnnnnnnnnnnnnnnnnnnnnnnnnnnnnnnnnnnnnnnnnnnnnnnnnnnnnnnnnnnnnnnnnnnnnnnnnnnnnnnnnnnnnnnnnnnnnnnnnnnnnnnnnnnnnnnnnnnnnnnnnnnnnnnnnnnnnnnnnnnnnnnnnnnnnnnnnnnnnnnnnnnnnnnnnnnnnnnnnnnnnnnnnnnnnnnnnnnnnnnnnnnnnnnnnnnnnnnnnnnnnnnnnnnnnnnnnnnnnnnnnnnnnnnnnnnnnnnnnnnnnnnnnnnnnnnnnnnnnnnnnnnnnnnnnnnnnnnnnnnnnnnnnnnnnnnnnnnnnnnnnnnnnnnnnnnnnnnnnnnnnnnnnnnnnnnnnnnnnnnnnnnnnnnnnnnnnnnnnnnnnnnnnnnnnnnnnnnnnnnnnnnnnnnnnnnnnnnnnnnnnnnnnnnnnnnnnnnnnnnnnnnnnnnnnnnnnnnnnnnnnnnnnnnnnnnnnnnnnnnnnnnnnnnnnnnnnnnnnnnnnnnnnnnnnnnnnnnnnnnnnnnnnnnnnnnnnnnnnnnnnnnnnnnnnnnnnnnnnnnnnnnnnnnnnnnnnnnnnnnnnnnnnnnnnnnnnnnnnnnnnnnnnnnnnnnnnnnnnnnnnnnnnnnnnnnnnnnnnnnnnnnnnnnnnnnnnnnnnnnnnnnnnnnnnnnnnnnnnnnnnnnnnnnnnnnnnnnnnnnnnnnnnnnnnnnnnnnnnnnnnnnnnnnnnnnnnnnnnnnnnnnnnnnnnnnnnnnnnnnnnnnnnnnnnnnnnnnnnnnnnnnnnnnnnnnnnnnnnnnnnnnnnnnnnnnnnnnnnnnnnnnnnnnnnnnnnnnnnnnnnnnnnnnnnnnnnnnnnnnnnnnnnnnnnnnnnnnnnnnnnnnnnnnnnnnnnnnnnnnnnnnnnnnnnnnnnnnnnnnnnnnnnnnnnnnnnnnnnnnnnnnnnnnnnnnnnnnnnnnnnnnnnnnnnnnnnnnnnnnnnnnnnnnnnnnnnnnnnnnnnnnnnnnnnnnnnnnnnnnnnnnnnnnnnnnnnnnnnnnnnnnnnnnnnnnnnnnnnnnnnnnnnnnnnnnnnnnnnnnnnnnnnnnnnnnnnnnnnnnnnnnnnnnnnnnnnnnnnnnnnnnnnnnnnnnnnnnnnnnnnnnnnnnnnnnnnnnnnnnnnnnnnnnnnnnnnnnnnnnnnnnnnnnnnnnnnnnnnnnnnnnnnnnnnnnnnnnnnnnnnnnnnnnnnnnnnnnnnnnnnnnnnnnnnnnnnnnnnnnnnnnnnnnnnnnnnnnnnnnnnnnnnnnnnnnnnnnnnnnnnnnnnnnnnnnnnnnnnnnnnnnnnnnnnnnnnnnnnnnnnnnnnnnnnnnnnnnnnnnnnnnnnnnnnnnnnnnnnnnnnnnnnnnnnnnnnnnnnnnnnnnnnnnnnnnnnnnnnnnnnnnnnnnnnnnnnnnnnnnnnnnnnnnnnnnnnnnnnnnnnnnnnnnnnnnnnnnnnnnnnnnnnnnnnnnnnnnnnnnnnnnnnnnnnnnnnnnnnnnnnnnnnnnnnnnnnnnnnnnnnnnnnnnnnnnnnnnnnnnnnnnnnnnnnnnnnnnnnnnnnnnnnnnnnnnnnnnnnnnnnnnnnnnnnnnnnnnnnnnnnnnnnnnnnnnnnnnnnnnnnnnnnnnnnnnnnnnnnnnnnnnnnnnnnnnnnnnnnnnnnnnnnnnnnnnnnnnnnnnnnnnnnnnnnnnnnnnnnnnnnnnnnnnnnnnnnnnnnnnnnnnnnnnnnnnnnnnnnnnnnnnnnnnnnnnnnnnnnnnnnnnnnnnnnnnnnnnnnnnnnnnnnnnnnnnnnnnnnnnnnnnnnnnnnnnnnnnnnnnnnnnnnnnnnnnnnnnnnnnnnnnnnnnnnnnnnnnnnnnnnnnnnnnnnnnnnnnnnnnnnnnnnnnnnnnnnnnnnnnnnnnnnnnnnnnnnnnnnnnnnnnnnnnnnnnnnnnnnnnnnnnnnnnnnnnnnnnnnnnnnnnnnnnnnnnnnnnnnnnnnnnnnnnnnnnnnnnnnnnnnnnnnnnnnnnnnnnnnnnnnnnnnnnnnnnnnnnnnnnnnnnnnnnnnnnnnnnnnnnnnnnnnnnnnnnnnnnnnnnnnnnnnnnnnnnnnnnnnnnnnnnnnnnnnnnnnnnnnnnnnnnnnnnnnnnnnnnnnnnnnnnnnnnnnnnnnnnnnnnnnnnnnnnnnnnnnnnnnnnnnnnnnnnnnnnnnnnnnnnnnnnnnnnnnnnnnnnnnnnnnnnnnnnnnnnnnnnnnnnnnnnnnnnnnnnnnnnnnnnnnnnnnnnnnnnnnnnnnnnnnnnnnnnnnnnnnnnnnnnnnnnnnnnnnnnnnnnnnnnnnnnnnnnnnnnnnnnnnnnnnnnnnnnnnnnnnnnnnnnnnnnnnnnnnnnnnnnnnnnnnnnnnnnnnnnnnnnnnnnnnnnnnnnnnnnnnnnnnnnnnnnnnnnnnnnnnnnnnnnnnnnnnnnnnnnnnnnnnnnnnnnnnnnnnnnnnnnnnnnnnnnnnnnnnnnnnnnnnnnnnnnnnnnnnnnnnnnnnnnnnnnnnnnnnnnnnnnnnnnnnnnnnnnnnnnnnnnnnnnnnnnnnnnnnnnnnnnnnnnnnnnnnnnnnnnnnnnnnnnnnnnnnnnnnnnnnnnnnnnnnnnnnnnnnnnnnnnnnnnnnnnnnnnnnnnnnnnnnnnnnnnnnnnnnnnnnnnnnnnnnnnnnnnnnnnnnnnnnnnnnnnnnnnnnnnnnnnnnnnnnnnnnnnnnnnnnnnnnnnnnnnnnnnnnnnnnnnnnnnnnnnnnnnnnnnnnnnnnnnnnnnnnnnnnnnnnnnnnnnnnnnnnnnnnnnnnnnnnnnnnnnnnnnnnnnnnnnnnnnnnnnnnnnnnnnnnnnnnnnnnnnnnnnnnnnnnnnnnnnnnnnnnnnnnnnnnnnnnnnnnnnnnnnnnnnnnnnnnnnnnnnnnnnnnnnnnnnnnnnnnnnnnnnnnnnnnnnnnnnnnnnnnnnnnnnnnnnnnnnnnnnnnnnnnnnnnnnnnnnnnnnnnnnnnnnnnnnnnnnnnnnnnnnnnnnnnnnnnnnnnnnnnnnnnnnnnnnnnnnnnnnnnnnnnnnnnnnnnnnnnnnnnnnnnnnnnnnnnnnnnnnnnnnnnnnnnnnnnnnnnnnnnnnnnnnnnnnnnnnnnnnnnnnnnnnnnnnnnnnnnnnnnnnnnnnnnnnnnnnnnnnnnnnnnnnnnnnnnnnnnnnnnnnnnnnnnnnnnnnnnnnnnnnnnnnnnnnnnnnnnnnnnnnnnnnnnnnnnnnnnnnnnnnnnnnnnnnnnnnnnnnnnnnnnnnnnnnnnnnnnnnnnnnnnnnnnnnnnnnnnnnnnnnnnnnnnnnnnnnnnnnnnnnnnnnnnnnnnnnnnnnnnnnnnnnnnnnnnnnnnnnnnnnnnnnnnnnnnnnnnnnnnnnnnnnnnnnnnnnnnnnnnnnnnnnnnnnnnnnnnnnnnnnnnnnnnnnnnnnnnnnnnnnnnnnnnnnnnnnnnnnnnnnnnnnnnnnnnnnnnnnnnnnnnnnnnnnnnnnnnnnnnnnnnnnnnnnnnnnnnnnnnnnnnnnnnnnnnnnnnnnnnnnnnnnnnnnnnnnnnnnnnnnnnnnnnnnnnnnnnnnnnnnnnnnnnnnnnnnnnnnnnnnnnnnnnnnnnnnnnnnnnnnnnnnnnnnnnnnnnnnnnnnnnnnnnnnnnnnnnnnnnnnnnnnnnnnnnnnnnnnnnnnnnnnnnnnnnnnnnnnnnnnnnnnnnnnnnnnnnnnnnnnnnnnnnnnnnnnnnnnnnnnnnnnnnnnnnnnnnnnnnnnnnnnnnnnnnnnnnnnnnnnnnnnnnnnnnnnnnnnnnnnnnnnnnnnnnnnnnnnnnnnnnnnnnnnnnnnnnnnnnnnnnnnnnnnnnnnnnnnnnnnnnnnnnnnnnnnnnnnnnnnnnnnnnnnnnnnnnnnnnnnnnnnnnnnnnnnnnnnnnnnnnnnnnnnnnnnnnnnnnnnnnnnnnnnnnnnnnnnnnnnnnnnnnnnnnnnnnnnnnnnnnnnnnnnnnnnnnnnnnnnnnnnnnnnnnnnnnnnnnnnnnnnnnnnnnnnnnnnnnnnnnnnnnnnnnnnnnnnnnnnnnnnnnnnnnnnnnnnnnnnnnnnnnnnnnnnnnnnnnnnnnnnnnnnnnnnnnnnnnnnnnnnnnnnnnnnnnnnnnnnnnnnnnnnnnnnnnnnnnnnnnnnnnnnnnnnnnnnnnnnnnnnnnnnnnnnnnnnnnnnnnnnnnnnnnnnnnnnnnnnnnnnnnnnnnnnnnnnnnnnnnnnnnnnnnnnnnnnnnnnnnnnnnnnnnnnnnnnnnnnnnnnnnnnnnnnnnnnnnnnnnnnnnnnnnnnnnnnnnnnnnnnnnnnnnnnnnnnnnnnnnnnnnnnnnnnnnnnnnnnnnnnnnnnnnnnnnnnnnnnnnnnnnnnnnnnnnnnnnnnnnnnnnnnnnnnnnnnnnnnnnnnnnnnnnnnnnnnnnnnnnnnnnnnnnnnnnnnnnnnnnnnnnnnnnnnnnnnnnnnnnnnnnnnnnnnnnnnnnnnnnnnnnnnnnnnnnnnnnnnnnnnnnnnnnnnnnnnnnnnnnnnnnnnnnnnnnnnnnnnnnnnnnnnnnnnnnnnnnnnnnnnnnnnnnnnnnnnnnnnnnnnnnnnnnnnnnnnnnnnnnnnnnnnnnnnnnnnnnnnnnnnnnnnnnnnnnnnnnnnnnnnnnnnnnnnnnnnnnnnnnnnnnnnnnnnnnnnnnnnnnnnnnnnnnnnnnnnnnnnnnnnnnnnnnnnnnnnnnnnnnnnnnnnnnnnnnnnnnnnnnnnnnnnnnnnnnnnnnnnnnnnnnnnnnnnnnnnnnnnnnnnnnnnnnnnnnnnnnnnnnnnnnnnnnnnnnnnnnnnnnnnnnnnnnnnnnnnnnnnnnnnnnnnnnnnnnnnnnnnnnnnnnnnnnnnnnnnnnnnnnnnnnnnnnnnnnnnnnnnnnnnnnnnnnnnnnnnnnnnnnnnnnnnnnnnnnnnnnnnnnnnnnnnnnnnnnnnnnnnnnnnnnnnnnnnnnnnnnnnnnnnnnnnnnnnnnnnnnnnnnnnnnnnnnnnnnnnnnnnnnnnnnnnnnnnnnnnnnnnnnnnnnnnnnnnnnnnnnnnnnnnnnnnnnnnnnnnnnnnnnnnnnnnnnnnnnnnnnnnnnnnnnnnnnnnnnnnnnnnnnnnnnnnnnnnnnnnnnnnnnnnnnnnnnnnnnnnnnnnnnnnnnnnnnnnnnnnnnnnnnnnnnnnnnnnnnnnnnnnnnnnnnnnnnnnnnnnnnnnnnnnnnnnnnnnnnnnnnnnnnnnnnnnnnnnnnnnnnnnnnnnnnnnnnnnnnnnnnnnnnnnnnnnnnnnnnnnnnnnnnnnnnnnnnnnnnnnnnnnnnnnnnnnnnnnnnnnnnnnnnnnnnnnnnnnnnnnnnnnnnnnnnnnnnnnnnnnnnnnnnnnnnnnnnnnnnnnnnnnnnnnnnnnnnnnnnnnnnnnnnnnnnnnnnnnnnnnnnnnnnnnnnnnnnnnnnnnnnnnnnnnnnnnnnnnnnnnnnnnnnnnnnnnnnnnnnnnnnnnnnnnnnnnnnnnnnnnnnnnnnnnnnnnnnnnnnnnnnnnnnnnnnnnnnnnnnnnnnnnnnnnnnnnnnnnnnnnnnnnnnnnnnnnnnnnnnnnnnnnnnnnnnnnnnnnnnnnnnnnnnnnnnnnnnnnnnnnnnnnnnnnnnnnnnnnnnnnnnnnnnnnnnnnnnnnnnnnnnnnnnnnnnnnnnnnnnnnnnnnnnnnnnnnnnnnnnnnnnnnnnnnnnnnnnnnnnnnnnnnnnnnnnnnnnnnnnnnnnnnnnnnnnnnnnnnnnnnnnnnnnnnnnnnnnnnnnnnnnnnnnnnnnnnnnnnnnnnnnnnnnnnnnnnnnnnnnnnnnnnnnnnnnnnnnnnnnnnnnnnnnnnnnnnnnnnnnnnnnnnnnnnnnnnnnnnnnnnnnnnnnnnnnnnnnnnnnnnnnnnnnnnnnnnnnnnnnnnnnnnnnnnnnnnnnnnnnnnnnnnnnnnnnnnnnnnnnnnnnnnnnnnnnnnnnnnnnnnnnnnnnnnnnnnnnnnnnnnnnnnnnnnnnnnnnnnnnnnnnnnnnnnnnnnnnnnnnnnnnnnnnnnnnnnnnnnnnnnnnnnnnnnnnnnnnnnnnnnnnnnnnnnnnnnnnnnnnnnnnnnnnnnnnnnnnnnnnnnnnnnnnnnnnnnnnnnnnnnnnnnnnnnnnnnnnnnnnnnnnnnnnnnnnnnnnnnnnnnnnnnnnnnnnnnnnnnnnnnnnnnnnnnnnnnnnnnnnnnnnnnnnnnnnnnnnnnnnnnnnnnnnnnnnnnnnnnnnnnnnnnnnnnnnnnnnnnnnnnnnnnnnnnnnnnnnnnnnnnnnnnnnnnnnnnnnnnnnnnnnnnnnnnnnnnnnnnnnnnnnnnnnnnnnnnnnnnnnnnnnnnnnnnnnnnnnnnnnnnnnnnnnnnnnnnnnnnnnnnnnnnnnnnnnnnnnnnnnnnnnnnnnnnnnnnnnnnnnnnnnnnnnnnnnnnnnnnnnnnnnnnnnnnnnnnnnnnnnnnnnnnnnnnnnnnnnnnnnnnnnnnnnnnnnnnnnnnnnnnnnnnnnnnnnnnnnnnnnnnnnnnnnnnnnnnnnnnnnnnnnnnnnnnnnnnnnnnnnnnnnnnnnnnnnnnnnnnnnnnnnnnnnnnnnnnnnnnnnnnnnnnnnnnnnnnnnnnnnnnnnnnnnnnnnnnnnnnnnnnnnnnnnnnnnnnnnnnnnnnnnnnnnnnnnnnnnnnnnnnnnnnnnnnnnnnnnnnnnnnnnnnnnnnnnnnnnnnnnnnnnnnnnnnnnnnnnnnnnnnnnnnnnnnnnnnnnnnnnnnnnnnnnnnnnnnnnnnnnnnnnnnnnnnnnnnnnnnnnnnnnnnnnnnnnnnnnnnnnnnnnnnnnnnnnnnnnnnnnnnnnnnnnnnnnnnnnnnnnnnnnnnnnnnnnnnnnnnnnnnnnnnnnnnnnnnnnnnnnnnnnnnnnnnnnnnnnnnnnnnnnnnnnnnnnnnnnnnnnnnnnnnnnnnnnnnnnnnnnnnnnnnnnnnnnnnnnnnnnnnnnnnnnnnnnnnnnnnnnnnnnnnnnnnnnnnnnnnnnnnnnnnnnnnnnnnnnnnnnnnnnnnnnnnnnnnnnnnnnnnnnnnnnnnnnnnnnnnnnnnnnnnnnnnnnnnnnnnnnnnnnnnnnnnnnnnnnnnnnnnnnnnnnnnnnnnnnnnnnnnnnnnnnnnnnnnnnnnnnnnnnnnnnnnnnnnnnnnnnnnnnnnnnnnnnnnnnnnnnnnnnnnnnnnnnnnnnnnnnnnnnnnnnnnnnnnnnnnnnnnnnnnnnnnnnnnnnnnnnnnnnnnnnnnnnnnnnnnnnnnnnnnnnnnnnnnnnnnnnnnnnnnnnnnnnnnnnnnnnnnnnnnnnnnnnnnnnnnnnnnnnnnnnnnnnnnnnnnnnnnnnnnnnnnnnnnnnnnnnnnnnnnnnnnnnnnnnnnnnnnnnnnnnnnnnnnnnnnnnnnnnnnnnnnnnnnnnnnnnnnnnnnnnnnnnnnnnnnnnnnnnnnnnnnnnnnnnnnnnnnnnnnnnnnnnnnnnnnnnnnnnnnnnnnnnnnnnnnnnnnnnnnnnnnnnnnnnnnnnnnnnnnnnnnnnnnnnnnnnnnnnnnnnnnnnnnnnnnnnnnnnnnnnnnnnnnnnnnnnnnnnnnnnnnnnnnnnnnnnnnnnnnnnnnnnnnnnnnnnnnnnnnnnnnnnnnnnnnnnnnnnnnnnnnnnnnnnnnnnnnnnnnnnnnnnnnnnnnnnnnnnnnnnnnnnnnnnnnnnnnnnnnnnnnnnnnnnnnnnnnnnnnnnnnnnnnnnnnnnnnnnnnnnnnnnnnnnnnnnnnnnnnnnnnnnnnnnnnnnnnnnnnnnnnnnnnnnnnnnnnnnnnnnnnnnnnnnnnnnnnnnnnnnnnnnnnnnnnnnnnnnnnnnnnnnnnnnnnnnnnnnnnnnnnnnnnnnnnnnnnnnnnnnnnnnnnnnnnnnnnnnnnnnnnnnnnnnnnnnnnnnnnnnnnnnnnnnnnnnnnnnnnnnnnnnnnnnnnnnnnnnnnnnnnnnnnnnnnnnnnnnnnnnnnnnnnnnnnnnnnnnnnnnnnnnnnnnnnnnnnnnnnnnnnnnnnnnnnnnnnnnnnnnnnnnnnnnnnnnnnnnnnnnnnnnnnnnnnnnnnnnnnnnnnnnnnnnnnnnnnnnnnnnnnnnnnnnnnnnnnnnnnnnnnnnnnnnnnnnnnnnnnnnnnnnnnnnnnnnnnnnnnnnnnnnnnnnnnnnnnnnnnnnnnnnnnnnnnnnnnnnnnnnnnnnnnnnnnnnnnnnnnnnnnnnnnnnnnnnnnnnnnnnnnnnnnnnnnnnnnnnnnnnnnnnnnnnnnnnnnnnnnnnnnnnnnnnnnnnnnnnnnnnnnnnnnnnnnnnnnnnnnnnnnnnnnnnnnnnnnnnnnnnnnnnnnnnnnnnnnnnnnnnnnnnnnnnnnnnnnnnnnnnnnnnnnnnnnnnnnnnnnnnnnnnnnnnnnnnnnnnnnnnnnnnnnnnnnnnnnnnnnnnnnnnnnnnnnnnnnnnnnnnnnnnnnnnnnnnnnnnnnnnnnnnnnnnnnnnnnnnnnnnnnnnnnnnnnnnnnnnnnnnnnnnnnnnnnnnnnnnnnnnnnnnnnnnnnnnnnnnnnnnnnnnnnnnnnnnnnnnnnnnnnnnnnnnnnnnnnnnnnnnnnnnnnnnnnnnnnnnnnnnnnnnnnnnnnnnnnnnnnnnnnnnnnnnnnnnnnnnnnnnnnnnnnnnnnnnnnnnnnnnnnnnnnnnnnnnnnnnnnnnnnnnnnnnnnnnnnnnnnnnnnnnnnnnnnnnnnnnnnnnnnnnnnnnnnnnnnnnnnnnnnnnnnnnnnnnnnnnnnnnnnnnnnnnnnnnnnnnnnnnnnnnnnnnnnnnnnnnnnnnnnnnnnnnnnnnnnnnnnnnnnnnnnnnnnnnnnnnnnnnnnnnnnnnnnnnnnnnnnnnnnnnnnnnnnnnnnnnnnnnnnnnnnnnnnnnnnnnnnnnnnnnnnnnnnnnnnnnnnnnnnnnnnnnnnnnnnnnnnnnnnnnnnnnnnnnnnnnnnnnnnnnnnnnnnnnnnnnnnnnnnnnnnnnnnnnnnnnnnnnnnnnnnnnnnnnnnnnnnnnnnnnnnnnnnnnnnnnnnnnnnnnnnnnnnnnnnnnnnnnnnnnnnnnnnnnnnnnnnnnnnnnnnnnnnnnnnnnnnnnnnnnnnnnnnnnnnnnnnnnnnnnnnnnnnnnnnnnnnnnnnnnnnnnnnnnnnnnnnnnnnnnnnnnnnnnnnnnnnnnnnnnnnnnnnnnnnnnnnnnnnnnnnnnnnnnnnnnnnnnnnnnnnnnnnnnnnnnnnnnnnnnnnnnnnnnnnnnnnnnnnnnnnnnnnnnnnnnnnnnnnnnnnnnnnnnnnnnnnnnnnnnnnnnnnnnnnnnnnnnnnnnnnnnnnnnnnnnnnnnnnnnnnnnnnnnnnnnnnnnnnnnnnnnnnnnnnnnnnnnnnnnnnnnnnnnnnnnnnnnnnnnnnnnnnnnnnnnnnnnnnnnnnnnnnnnnnnnnnnnnnnnnnnnnnnnnnnnnnnnnnnnnnnnnnnnnnnnnnnnnnnnnnnnnnnnnnnnnnnnnnnnnnnnnnnnnnnnnnnnnnnnnnnnnnnnnnnnnnnnnnnnnnnnnnnnnnnnnnnnnnnnnnnnnnnnnnnnnnnnnnnnnnnnnnnnnnnnnnnnnnnnnnnnnnnnnnnnnnnnnnnnnnnnnnnnnnnnnnnnnnnnnnnnnnnnnnnnnnnnnnnnnnnnnnnnnnnnnnnnnnnnnnnnnnnnnnnnnnnnnnnnnnnnnnnnnnnnnnnnnnnnnnnnnnnnnnnnnnnnnnnnnnnnnnnnnnnnnnnnnnnnnnnnnnnnnnnnnnnnnnnnnnnnnnnnnnnnnnnnnnnnnnnnnnnnnnnnnnnnnnnnnnnnnnnnnnnnnnnnnnnnnnnnnnnnnnnnnnnnnnnnnnnnnnnnnnnnnnnnnnnnnnnnnnnnnnnnnnnnnnnnnnnnnnnnnnnnnnnnnnnnnnnnnnnnnnnnnnnnnnnnnnnnnnnnnnnnnnnnnnnnnnnnnnnnnnnnnnnnnnnnnnnnnnnnnnnnnnnnnnnnnnnnnnnnnnnnnnnnnnnnnnnnnnnnnnnnnnnnnnnnnnnnnnnnnnnnnnnnnnnnnnnnnnnnnnnnnnnnnnnnnnnnnnnnnnnnnnnnnnnnnnnnnnnnnnnnnnnnnnnnnnnnnnnnnnnnnnnnnnnnnnnnnnnnnnnnnnnnnnnnnnnnnnnnnnnnnnnnnnnnnnnnnnnnnnnnnnnnnnnnnnnnnnnnnnnnnnnnnnnnnnnnnnnnnnnnnnnnnnnnnnnnnnnnnnnnnnnnnnnnnnnnnnnnnnnnnnnnnnnnnnnnnnnnnnnnnnnnnnnnnnnnnnnnnnnnnnnnnnnnnnnnnnnnnnnnnnnnnnnnnnnnnnnnnnnnnnnnnnnnnnnnnnnnnnnnnnnnnnnnnnnnnnnnnnnnnnnnnnnnnnnnnnnnnnnnnnnnnnnnnnnnnnnnnnnnnnnnnnnnnnnnnnnnnnnnnnnnnnnnnnnnnnnnnnnnnnnnnnnnnnnnnnnnnnnnnnnnnnnnnnnnnnnnnnnnnnnnnnnnnnnnnnnnnnnnnnnnnnnnnnnnnnnnnnnnnnnnnnnnnnnnnnnnnnnnnnnnnnnnnnnnnnnnnnnnnnnnnnnnnnnnnnnnnnnnnnnnnnnnnnnnnnnnnnnnnnnnnnnnnnnnnnnnnnnnnnnnnnnnnnnnnnnnnnnnnnnnnnnnnnnnnnnnnnnnnnnnnnnnnnnnnnnnnnnnnnnnnnnnnnnnnnnnnnnnnnnnnnnnnnnnnnnnnnnnnnnnnnnnnnnnnnnnnnnnnnnnnnnnnnnnnnnnnnnnnnnnnnnnnnnnnnnnnnnnnnnnnnnnnnnnnnnnnnnnnnnnnnnnnnnnnnnnnnnnnnnnnnnnnnnnnnnnnnnnnnnnnnnnnnnnnnnnnnnnnnnnnnnnnnnnnnnnnnnnnnnnnnnnnnnnnnnnnnnnnnnnnnnnnnnnnnnnnnnnnnnnnnnnnnnnnnnnnnnnnnnnnnnnnnnnnnnnnnnnnnnnnnnnnnnnnnnnnnnnnnnnnnnnnnnnnnnnnnnnnnnnnnnnnnnnnnnnnnnnnnnnnnnnnnnnnnnnnnnnnnnnnnnnnnnnnnnnnnnnnnnnnnnnnnnnnnnnnnnnnnnnnnnnnnnnnnnnnnnnnnnnnnnnnnnnnnnnnnnnnnnnnnnnnnnnnnnnnnnnnnnnnnnnnnnnnnnnnnnnnnnnnnnnnnnnnnnnnnnnnnnnnnnnnnnnnnnnnnnnnnnnnnnnnnnnnnnnnnnnnnnnnnnnnnnnnnnnnnnnnnnnnnnnnnnnnnnnnnnnnnnnnnnnnnnnnnnnnnnnnnnnnnnnnnnnnnnnnnnnnnnnnnnnnnnnnnnnnnnnnnnnnnnnnnnnnnnnnnnnnnnnnnnnnnnnnnnnnnnnnnnnnnnnnnnnnnnnnnnnnnnnnnnnnnnnnnnnnnnnnnnnnnnnnnnnnnnnnnnnnnnnnnnnnnnnnnnnnnnnnnnnnnnnnnnnnnnnnnnnnnnnnnnnnnnnnnnnnnnnnnnnnnnnnnnnnnnnnnnnnnnnnnnnnnnnnnnnnnnnnnnnnnnnnnnnnnnnnnnnnnnnnnnnnnnnnnnnnnnnnnnnnnnnnnnnnnnnnnnnnnnnnnnnnnnnnnnnnnnnnnnnnnnnnnnnnnnnnnnnnnnnnnnnnnnnnnnnnnnnnnnnnnnnnnnnnnnnnnnnnnnnnnnnnnnnnnnnnnnnnnnnnnnnnnnnnnnnnnnnnnnnnnnnnnnnnnnnnnnnnnnnnnnnnnnnnnnnnnnnnnnnnnnnnnnnnnnnnnnnnnnnnnnnnnnnnnnnnnnnnnnnnnnnnnnnnnnnnnnnnnnnnnnnnnnnnnnnnnnnnnnnnnnnnnnnnnnnnnnnnnnnnnnnnnnnnnnnnnnnnnnnnnnnnnnnnnnnnnnnnnnnnnnnnnnnnnnnnnnnnnnnnnnnnnnnnnnnnnnnnnnnnnnnnnnnnnnnnnnnnnnnnnnnnnnnnnnnnnnnnnnnnnnnnnnnnnnnnnnnnnnnnnnnnnnnnnnnnnnnnnnnnnnnnnnnnnnnnnnnnnnnnnnnnnnnnnnnnnnnnnnnnnnnnnnnnnnnnnnnnnnnnnnnnnnnnnnnnnnnnnnnnnnnnnnnnnnnnnnnnnnnnnnnnnnnnnnnnnnnnnnnnnnnnnnnnnnnnnnnnnnnnnnnnnnnnnnnnnnnnnnnnnnnnnnnnnnnnnnnnnnnnnnnnnnnnnnnnnnnnnnnnnnnnnnnnnnnnnnnnnnnnnnnnnnnnnnnnnnnnnnnnnnnnnnnnnnnnnnnnnnnnnnnnnnnnnnnnnnnnnnnnnnnnnnnnnnnnnnnnnnnnnnnnnnnnnnnnnnnnnnnnnnnnnnnnnnnnnnnnnnnnnnnnnnnnnnnnnnnnnnnnnnnnnnnnnnnnnnnnnnnnnnnnnnnnnnnnnnnnnnnnnnnnnnnnnnnnnnnnnnnnnnnnnnnnnnnnnnnnnnnnnnnnnnnnnnnnnnnnnnnnnnnnnnnnnnnnnnnnnnnnnnnnnnnnnnnnnnnnnnnnnnnnnnnnnnnnnnnnnnnnnnnnnnnnnnnnnnnnnnnnnnnnnnnnnnnnnnnnnnnnnnnnnnnnnnnnnnnnnnnnnnnnnnnnnnnnnnnnnnnnnnnnnnnnnnnnnnnnnnnnnnnnnnnnnnnnnnnnnnnnnnnnnnnnnnnnnnnnnnnnnnnnnnnnnnnnnnnnnnnnnnnnnnnnnnnnnnnnnnnnnnnnnnnnnnnnnnnnnnnnnnnnnnnnnnnnnnnnnnnnnnnnnnnnnnnnnnnnnnnnnnnnnnnnnnnnnnnnnnnnnnnnnnnnnnnnnnnnnnnnnnnnnnnnnnnnnnnnnnnnnnnnnnnnnnnnnnnnnnnnnnnnnnnnnnnnnnnnnnnnnnnnnnnnnnnnnnnnnnnnnnnnnnnnnnnnnnnnnnnnnnnnnnnnnnnnnnnnnnnnnnnnnnnnnnnnnnnnnnnnnnnnnnnnnnnnnnnnnnnnnnnnnnnnnnnnnnnnnnnnnnnnnnnnnnnnnnnnnnnnnnnnnnnnnnnnnnnnnnnnnnnnnnnnnnnnnnnnnnnnnnnnnnnnnnnnnnnnnnnnnnnnnnnnnnnnnnnnnnnnnnnnnnnnnnnnnnnnnnnnnnnnnnnnnnnnnnnnnnnnnnnnnnnnnnnnnnnnnnnnnnnnnnnnnnnnnnnnnnnnnnnnnnnnnnnnnnnnnnnnnnnnnnnnnnnnnnnnnnnnnnnnnnnnnnnnnnnnnnnnnnnnnnnnnnnnnnnnnnnnnnnnnnnnnnnnnnnnnnnnnnnnnnnnnnnnnnnnnnnnnnnnnnnnnnnnnnnnnnnnnnnnnnnnnnnnnnnnnnnnnnnnnnnnnnnnnnnnnnnnnnnnnnnnnnnnnnnnnnnnnnnnnnnnnnnnnnnnnnnnnnnnnnnnnnnnnnnnnnnnnnnnnnnnnnnnnnnnnnnnnnnnnnnnnnnnnnnnnnnnnnnnnnnnnnnnnnnnnnnnnnnnnnnnnnnnnnnnnnnnnnnnnnnnnnnnnnnnnnnnnnnnnnnnnnnnnnnnnnnnnnnnnnnnnnnnnnnnnnnnnnnnnnnnnnnnnnnnnnnnnnnnnnnnnnnnnnnnnnnnnnnnnnnnnnnnnnnnnnnnnnnnnnnnnnnnnnnnnnnnnnnnnnnnnnnnnnnnnnnnnnnnnnnnnnnnnnnnnnnnnnnnnnnnnnnnnnnnnnnnnnnnnnnnnnnnnnnnnnnnnnnnnnnnnnnnnnnnnnnnnnnnnnnnnnnnnnnnnnnnnnnnnnnnnnnnnnnnnnnnnnnnnnnnnnnnnnnnnnnnnnnnnnnnnnnnnnnnnnnnnnnnnnnnnnnnnnnnnnnnnnnnnnnnnnnnnnnnnnnnnnnnnnnnnnnnnnnnnnnnnnnnnnnnnnnnnnnnnnnnnnnnnnnnnnnnnnnnnnnnnnnnnnnnnnnnnnnnnnnnnnnnnnnnnnnnnnnnnnnnnnnnnnnnnnnnnnnnnnnnnnnnnnnnnnnnnnnnnnnnnnnnnnnnnnnnnnnnnnnnnnnnnnnnnnnnnnnnnnnnnnnnnnnnnnnnnnnnnnnnnnnnnnnnnnnnnnnnnnnnnnnnnnnnnnnnnnnnnnnnnnnnnnnnnnnnnnnnnnnnnnnnnnnnnnnnnnnnnnnnnnnnnnnnnnnnnnnnnnnnnnnnnnnnnnnnnnnnnnnnnnnnnnnnnnnnnnnnnnnnnnnnnnnnnnnnnnnnnnnnnnnnnnnnnnnnnnnnnnnnnnnnnnnnnnnnnnnnnnnnnnnnnnnnnnnnnnnnnnnnnnnnnnnnnnnnnnnnnnnnnnnnnnnnnnnnnnnnnnnnnnnnnnnnnnnnnnnnnnnnnnnnnnnnnnnnnnnnnnnnnnnnnnnnnnnnnnnnnnnnnnnnnnnnnnnnnnnnnnnnnnnnnnnnnnnnnnnnnnnnnnnnnnnnnnnnnnnnnnnnnnnnnnnnnnnnnnnnnnnnnnnnnnnnnnnnnnnnnnnnnnnnnnnnnnnnnnnnnnnnnnnnnnnnnnnnnnnnnnnnnnnnnnnnnnnnnnnnnnnnnnnnnnnnnnnnnnnnnnnnnnnnnnnnnnnnnnnnnnnnnnnnnnnnnnnnnnnnnnnnnnnnnnnnnnnnnnnnnnnnnnnnnnnnnnnnnnnnnnnnnnnnnnnnnnnnnnnnnnnnnnnnnnnnnnnnnnnnnnnnnnnnnnnnnnnnnnnnnnnnnnnnnnnnnnnnnnnnnnnnnnnnnnnnnnnnnnnnnnnnnnnnnnnnnnnnnnnnnnnnnnnnnnnnnnnnnnnnnnnnnnnnnnnnnnnnnnnnnnnnnnnnnnnnnnnnnnnnnnnnnnnnnnnnnnnnnnnnnnnnnnnnnnnnnnnnnnnnnnnnnnnnnnnnnnnnnnnnnnnnnnnnnnnnnnnnnnnnnnnnnnnnnnnnnnnnnnnnnnnnnnnnnnnnnnnnnnnnnnnnnnnnnnnnnnnnnnnnnnnnnnnnnnnnnnnnnnnnnnnnnnnnnnnnnnnnnnnnnnnnnnnnnnnnnnnnnnnnnnnnnnnnnnnnnnnnnnnnnnnnnnnnnnnnnnnnnnnnnnnnnnnnnnnnnnnnnnnnnnnnnnnnnnnnnnnnnnnnnnnnnnnnnnnnnnnnnnnnnnnnnnnnnnnnnnnnnnnnnnnnnnnnnnnnnnnnnnnnnnnnnnnnnnnnnnnnnnnnnnnnnnnnnnnnnnnnnnnnnnnnnnnnnnnnnnnnnnnnnnnnnnnnnnnnnnnnnnnnnnnnnnnnnnnnnnnnnnnnnnnnnnnnnnnnnnnnnnnnnnnnnnnnnnnnnnnnnnnnnnnnnnnnnnnnnnnnnnnnnnnnnnnnnnnnnnnnnnnnnnnnnnnnnnnnnnnnnnnnnnnnnnnnnnnnnnnnnnnnnnnnnnnnnnnnnnnnnnnnnnnnnnnnnnnnnnnnnnnnnnnnnnnnnnnnnnnnnnnnnnnnnnnnnnnnnnnnnnnnnnnnnnnnnnnnnnnnnnnnnnnnnnnnnnnnnnnnnnnnnnnnnnnnnnnnnnnnnnnnnnnnnnnnnnnnnnnnnnnnnnnnnnnnnnnnnnnnnnnnnnnnnnnnnnnnnnnnnnnnnnnnnnnnnnnnnnnnnnnnnnnnnnnnnnnnnnnnnnnnnnnnnnnnnnnnnnnnnnnnnnnnnnnnnnnnnnnnnnnnnnnnnnnnnnnnnnnnnnnnnnnnnnnnnnnnnnnnnnnnnnnnnnnnnnnnnnnnnnnnnnnnnnnnnnnnnnnnnnnnnnnnnnnnnnnnnnnnnnnnnnnnnnnnnnnnnnnnnnnnnnnnnnnnnnnnnnnnnnnnnnnnnnnnnnnnnnnnnnnnnnnnnnnnnnnnnnnnnnnnnnnnnnnnnnnnnnnnnnnnnnnnnnnnnnnnnnnnnnnnnnnnnnnnnnnnnnnnnnnnnnnnnnnnnnnnnnnnnnnnnnnnnnnnnnnnnnnnnnnnnnnnnnnnnnnnnnnnnnnnnnnnnnnnnnnnnnnnnnnnnnnnnnnnnnnnnnnnnnnnnnnnnnnnnnnnnnnnnnnnnnnnnnnnnnnnnnnnnnnnnnnnnnnnnnnnnnnnnnnnnnnnnnnnnnnnnnnnnnnnnnnnnnnnnnnnnnnnnnnnnnnnnnnnnnnnnnnnnnnnnnnnnnnnnnnnnnnnnnnnnnnnnnnnnnnnnnnnnnnnnnnnnnnnnnnnnnnnnnnnnnnnnnnnnnnnnnnnnnnnnnnnnnnnnnnnnnnnnnnnnnnnnnnnnnnnnnnnnnnnnnnnnnnnnnnnnnnnnnnnnnnnnnnnnnnnnnnnnnnnnnnnnnnnnnnnnnnnnnnnnnnnnnnnnnnnnnnnnnnnnnnnnnnnnnnnnnnnnnnnnnnnnnnnnnnnnnnnnnnnnnnnnnnnnnnnnnnnnnnnnnnnnnnnnnnnnnnnnnnnnnnnnnnnnnnnnnnnnnnnnnnnnnnnnnnnnnnnnnnnnnnnnnnnnnnnnnnnnnnnnnnnnnnnnnnnnnnnnnnnnnnnnnnnnnnnnnnnnnnnnnnnnnnnnnnnnnnnnnnnnnnnnnnnnnnnnnnnnnnnnnnnnnnnnnnnnnnnnnnnnnnnnnnnnnnnnnnnnnnnnnnnnnnnnnnnnnnnnnnnnnnnnnnnnnnnnnnnnnnnnnnnnnnnnnnnnnnnnnnnnnnnnnnnnnnnnnnnnnnnnnnnnnnnnnnnnnnnnnnnnnnnnnnnnnnnnnnnnnnnnnnnnnnnnnnnnnnnnnnnnnnnnnnnnnnnnnnnnnnnnnnnnnnnnnnnnnnnnnnnnnnnnnnnnnnnnnnnnnnnnnnnnnnnnnnnnnnnnnnnnnnnnnnnnnnnnnnnnnnnnnnnnnnnnnnnnnnnnnnnnnnnnnnnnnnnnnnnnnnnnnnnnnnnnnnnnnnnnnnnnnnnnnnnnnnnnnnnnnnnnnnnnnnnnnnnnnnnnnnnnnnnnnnnnnnnnnnnnnnnnnnnnnnnnnnnnnnnnnnnnnnnnnnnnnnnnnnnnnnnnnnnnnnnnnnnnnnnnnnnnnnnnnnnnnnnnnnnnnnnnnnnnnnnnnnnnnnnnnnnnnnnnnnnnnnnnnnnnnnnnnnnnnnnnnnnnnnnnnnnnnnnnnnnnnnnnnnnnnnnnnnnnnnnnnnnnnnnnnnnnnnnnnnnnnnnnnnnnnnnnnnnnnnnnnnnnnnnnnnnnnnnnnnnnnnnnnnnnnnnnnnnnnnnnnnnnnnnnnnnnnnnnnnnnnnnnnnnnnnnnnnnnnnnnnnnnnnnnnnnnnnnnnnnnnnnnnnnnnnnnnnnnnnnnnnnnnnnnnnnnnnnnnnnnnnnnnnnnnnnnnnnnnnnnnnnnnnnnnnnnnnnnnnnnnnnnnnnnnnnnnnnnnnnnnnnnnnnnnnnnnnnnnnnnnnnnnnnnnnnnnnnnnnnnnnnnnnnnnnnnnnnnnnnnnnnnnnnnnnnnnnnnnnnnnnnnnnnnnnnnnnnnnnnnnnnnnnnnnnnnnnnnnnnnnnnnnnnnnnnnnnnnnnnnnnnnnnnnnnnnnnnnnnnnnnnnnnnnnnnnnnnnnnnnnnnnnnnnnnnnnnnnnnnnnnnnnnnnnnnnnnnnnnnnnnnnnnnnnnnnnnnnnnnnnnnnnnnnnnnnnnnnnnnnnnnnnnnnnnnnnnnnnnnnnnnnnnnnnnnnnnnnnnnnnnnnnnnnnnnnnnnnnnnnnnnnnnnnnnnnnnnnnnnnnnnnnnnnnnnnnnnnnnnnnnnnnnnnnnnnnnnnnnnnnnnnnnnnnnnnnnnnnnnnnnnnnnnnnnnnnnnnnnnnnnnnnnnnnnnnnnnnnnnnnnnnnnnnnnnnnnnnnnnnnnnnnnnnnnnnnnnnnnnnnnnnnnnnnnnnnnnnnnnnnnnnnnnnnnnnnnnnnnnnnnnnnnnnnnnnnnnnnnnnnnnnnnnnnnnnnnnnnnnnnnnnnnnnnnnnnnnnnnnnnnnnnnnnnnnnnnnnnnnnnnnnnnnnnnnnnnnnnnnnnnnnnnnnnnnnnnnnnnnnnnnnnnnnnnnnnnnnnnnnnnnnnnnnnnnnnnnnnnnnnnnnnnnnnnnnnnnnnnnnnnnnnnnnnnnnnnnnnnnnnnnnnnnnnnnnnnnnnnnnnnnnnnnnnnnnnnnnnnnnnnnnnnnnnnnnnnnnnnnnnnnnnnnnnnnnnnnnnnnnnnnnnnnnnnnnnnnnnnnnnnnnnnnnnnnnnnnnnnnnnnnnnnnnnnnnnnnnnnnnnnnnnnnnnnnnnnnnnnnnnnnnnnnnnnnnnnnnnnnnnnnnnnnnnnnnnnnnnnnnnnnnnnnnnnnnnnnnnnnnnnnnnnnnnnnnnnnnnnnnnnnnnnnnnnnnnnnnnnnnnnnnnnnnnnnnnnnnnnnnnnnnnnnnnnnnnnnnnnnnnnnnnnnnnnnnnnnnnnnnnnnnnnnnnnnnnnnnnnnnnnnnnnnnnnnnnnnnnnnnnnnnnnnnnnnnnnnnnnnnnnnnnnnnnnnnnnnnnnnnnnnnnnnnnnnnnnnnnnnnnnnnnnnnnnnnnnnnnnnnnnnnnnnnnnnnnnnnnnnnnnnnnnnnnnnnnnnnnnnnnnnnnnnnnnnnnnnnnnnnnnnnnnnnnnnnnnnnnnnnnnnnnnnnnnnnnnnnnnnnnnnnnnnnnnnnnnnnnnnnnnnnnnnnnnnnnnnnnnnnnnnnnnnnnnnnnnnnnnnnnnnnnnnnnnnnnnnnnnnnnnnnnnnnnnnnnnnnnnnnnnnnnnnnnnnnnnnnnnnnnnnnnnnnnnnnnnnnnnnnnnnnnnnnnnnnnnnnnnnnnnnnnnnnnnnnnnnnnnnnnnnnnnnnnnnnnnnnnnnnnnnnnnnnnnnnnnnnnnnnnnnnnnnnnnnnnnnnnnnnnnnnnnnnnnnnnnnnnnnnnnnnnnnnnnnnnnnnnnnnnnnnnnnnnnnnnnnnnnnnnnnnnnnnnnnnnnnnnnnnnnnnnnnnnnnnnnnnnnnnnnnnnnnnnnnnnnnnnnnnnnnnnnnnnnnnnnnnnnnnnnnnnnnnnnnnnnnnnnnnnnnnnnnnnnnnnnnnnnnnnnnnnnnnnnnnnnnnnnnnnnnnnnnnnnnnnnnnnnnnnnnnnnnnnnnnnnnnnnnnnnnnnnnnnnnnnnnnnnnnnnnnnnnnnnnnnnnnnnnnnnnnnnnnnnnnnnnnnnnnnnnnnnnnnnnnnnnnnnnnnnnnnnnnnnnnnnnnnnnnnnnnnnnnnnnnnnnnnnnnnnnnnnnnnnnnnnnnnnnnnnnnnnnnnnnnnnnnnnnnnnnnnnnnnnnnnnnnnnnnnnnnnnnnnnnnnnnnnnnnnnnnnnnnnnnnnnnnnnnnnnnnnnnnnnnnnnnnnnnnnnnnnnnnnnnnnnnnnnnnnnnnnnnnnnnnnnnnnnnnnnnnnnnnnnnnnnnnnnnnnnnnnnnnnnnnnnnnnnnnnnnnnnnnnnnnnnnnnnnnnnnnnnnnnnnnnnnnnnnnnnnnnnnnnnnnnnnnnnnnnnnnnnnnnnnnnnnnnnnnnnnnnnnnnnnnnnnnnnnnnnnnnnnnnnnnnnnnnnnnnnnnnnnnnnnnnnnnnnnnnnnnnnnnnnnnnnnnnnnnnnnnnnnnnnnnnnnnnnnnnnnnnnnnnnnnnnnnnnnnnnnnnnnnnnnnnnnnnnnnnnnnnnnnnnnnnnnnnnnnnnnnnnnnnnnnnnnnnnnnnnnnnnnnnnnnnnnnnnnnnnnnnnnnnnnnnnnnnnnnnnnnnnnnnnnnnnnnnnnnnnnnnnnnnnnnnnnnnnnnnnnnnnnnnnnnnnnnnnnnnnnnnnnnnnnnnnnnnnnnnnnnnnnnnnnnnnnnnnnnnnnnnnnnnnnnnnnnnnnnnnnnnnnnnnnnnnnnnnnnnnnnnnnnnnnnnnnnnnnnnnnnnnnnnnnnnnnnnnnnnnnnnnnnnnnnnnnnnnnnnnnnnnnnnnnnnnnnnnnnnnnnnnnnnnnnnnnnnnnnnnnnnnnnnnnnnnnnnnnnnnnnnnnnnnnnnnnnnnnnnnnnnnnnnnnnnnnnnnnnnnnnnnnnnnnnnnnnnnnnnnnnnnnnnnnnnnnnnnnnnnnnnnnnnnnnnnnnnnnnnnnnnnnnnnnnnnnnnnnnnnnnnnnnnnnnnnnnnnnnnnnnnnnnnnnnnnnnnnnnnnnnnnnnnnnnnnnnnnnnnnnnnnnnnnnnnnnnnnnnnnnnnnnnnnnnnnnnnnnnnnnnnnnnnnnnnnnnnnnnnnnnnnnnnnnnnnnnnnnnnnnnnnnnnnnnnnnnnnnnnnnnnnnnnnnnnnnnnnnnnnnnnnnnnnnnnnnnnnnnnnnnnnnnnnnnnnnnnnnnnnnnnnnnnnnnnnnnnnnnnnnnnnnnnnnnnnnnnnnnnnnnnnnnnnnnnnnnnnnnnnnnnnnnnnnnnnnnnnnnnnnnnnnnnnnnnnnnnnnnnnnnnnnnnnnnnnnnnnnnnnnnnnnnnnnnnnnnnnnnnnnnnnnnnnnnnnnnnnnnnnnnnnnnnnnnnnnnnnnnnnnnnnnnnnnnnnnnnnnnnnnnnnnnnnnnnnnnnnnnnnnnnnnnnnnnnnnnnnnnnnnnnnnnnnnnnnnnnnnnnnnnnnnnnnnnnnnnnnnnnnnnnnnnnnnnnnnnnnnnnnnnnnnnnnnnnnnnnnnnnnnnnnnnnnnnnnnnnnnnnnnnnnnnnnnnnnnnnnnnnnnnnnnnnnnnnnnnnnnnnnnnnnnnnnnnnnnnnnnnnnnnnnnnnnnnnnnnnnnnnnnnnnnnnnnnnnnnnnnnnnnnnnnnnnnnnnnnnnnnnnnnnnnnnnnnnnnnnnnnnnnnnnnnnnnnnnnnnnnnnnnnnnnnnnnnnnnnnnnnnnnnnnnnnnnnnnnnnnnnnnnnnnnnnnnnnnnnnnnnnnnnnnnnnnnnnnnnnnnnnnnnnnnnnnnnnnnnnnnnnnnnnnnnnnnnnnnnnnnnnnnnnnnnnnnnnnnnnnnnnnnnnnnnnnnnnnnnnnnnnnnnnnnnnnnnnnnnnnnnnnnnnnnnnnnnnnnnnnnnnnnnnnnnnnnnnnnnnnnnnnnnnnnnnnnnnnnnnnnnnnnnnnnnnnnnnnnnnnnnnnnnnnnnnnnnnnnnnnnnnnnnnnnnnnnnnnnnnnnnnnnnnnnnnnnnnnnnnnnnnnnnnnnnnnnnnnnnnnnnnnnnnnnnnnnnnnnnnnnnnnnnnnnnnnnnnnnnnnnnnnnnnnnnnnnnnnnnnnnnnnnnnnnnnnnnnnnnnnnnnnnnnnnnnnnnnnnnnnnnnnnnnnnnnnnnnnnnnnnnnnnnnnnnnnnnnnnnnnnnnnnnnnnnnnnnnnnnnnnnnnnnnnnnnnnnnnnnnnnnnnnnnnnnnnnnnnnnnnnnnnnnnnnnnnnnnnnnnnnnnnnnnnnnnnnnnnnnnnnnnnnnnnnnnnnnnnnnnnnnnnnnnnnnnnnnnnnnnnnnnnnnnnnnnnnnnnnnnnnnnnnnnnnnnnnnnnnnnnnnnnnnnnnnnnnnnnnnnnnnnnnnnnnnnnnnnnnnnnnnnnnnnnnnnnnnnnnnnnnnnnnnnnnnnnnnnnnnnnnnnnnnnnnnnnnnnnnnnnnnnnnnnnnnnnnnnnnnnnnnnnnnnnnnnnnnnnnnnnnnnnnnnnnnnnnnnnnnnnnnnnnnnnnnnnnnnnnnnnnnnnnnnnnnnnnnnnnnnnnnnnnnnnnnnnnnnnnnnnnnnnnnnnnnnnnnnnnnnnnnnnnnnnnnnnnnnnnnnnnnnnnnnnnnnnnnnnnnnnnnnnnnnnnnnnnnnnnnnnnnnnnnnnnnnnnnnnnnnnnnnnnnnnnnnnnnnnnnnnnnnnnnnnnnnnnnnnnnnnnnnnnnnnnnnnnnnnnnnnnnnnnnnnnnnnnnnnnnnnnnnnnnnnnnnnnnnnnnnnnnnnnnnnnnnnnnnnnnnnnnnnnnnnnnnnnnnnnnnnnnnnnnnnnnnnnnnnnnnnnnnnnnnnnnnnnnnnnnnnnnnnnnnnnnnnnnnnnnnnnnnnnnnnnnnnnnnnnnnnnnnnnnnnnnnnnnnnnnnnnnnnnnnnnnnnnnnnnnnnnnnnnnnnnnnnnnnnnnnnnnnnnnnnnnnnnnnnnnnnnnnnnnnnnnnnnnnnnnnnnnnnnnnnnnnnnnnnnnnnnnnnnnnnnnnnnnnnnnnnnnnnnnnnnnnnnnnnnnnnnnnnnnnnnnnnnnnnnnnnnnnnnnnnnnnnnnnnnnnnnnnnnnnnnnnnnnnnnnnnnnnnnnnnnnnnnnnnnnnnnnnnnnnnnnnnnnnnnnnnnnnnnnnnnnnnnnnnnnnnnnnnnnnnnnnnnnnnnnnnnnnnnnnnnnnnnnnnnnnnnnnnnnnnnnnnnnnnnnnnnnnnnnnnnnnnnnnnnnnnnnnnnnnnnnnnnnnnnnnnnnnnnnnnnnnnnnnnnnnnnnnnnnnnnnnnnnnnnnnnnnnnnnnnnnnnnnnnnnnnnnnnnnnnnnnnnnnnnnnnnnnnnnnnnnnnnnnnnnnnnnnnnnnnnnnnnnnnnnnnnnnnnnnnnnnnnnnnnnnnnnnnnnnnnnnnnnnnnnnnnnnnnnnnnnnnnnnnnnnnnnnnnnnnnnnnnnnnnnnnnnnnnnnnnnnnnnnnnnnnnnnnnnnnnnnnnnnnnnnnnnnnnnnnnnnnnnnnnnnnnnnnnnnnnnnnnnnnnnnnnnnnnnnnnnnnnnnnnnnnnnnnnnnnnnnnnnnnnnnnnnnnnnnnnnnnnnnnnnnnnnnnnnnnnnnnnnnnnnnnnnnnnnnnnnnnnnnnnnnnnnnnnnnnnnnnnnnnnnnnnnnnnnnnnnnnnnnnnnnnnnnnnnnnnnnnnnnnnnnnnnnnnnnnnnnnnnnnnnnnnnnnnnnnnnnnnnnnnnnnnnnnnnnnnnnnnnnnnnnnnnnnnnnnnnnnnnnnnnnnnnnnnnnnnnnnnnnnnnnnnnnnnnnnnnnnnnnnnnnnnnnnnnnnnnnnnnnnnnnnnnnnnnnnnnnnnnnnnnnnnnnnnnnnnnnnnnnnnnnnnnnnnnnnnnnnnnnnnnnnnnnnnnnnnnnnnnnnnnnnnnnnnnnnnnnnnnnnnnnnnnnnnnnnnnnnnnnnnnnnnnnnnnnnnnnnnnnnnnnnnnnnnnnnnnnnnnnnnnnnnnnnnnnnnnnnnnnnnnnnnnnnnnnnnnnnnnnnnnnnnnnnnnnnnnnnnnnnnnnnnnnnnnnnnnnnnnnnnnnnnnnnnnnnnnnnnnnnnnnnnnnnnnnnnnnnnnnnnnnnnnnnnnnnnnnnnnnnnnnnnnnnnnnnnnnnnnnnnnnnnnnnnnnnnnnnnnnnnnnnnnnnnnnnnnnnnnnnnnnnnnnnnnnnnnnnnnnnnnnnnnnnnnnnnnnnnnnnnnnnnnnnnnnnnnnnnnnnnnnnnnnnnnnnnnnnnnnnnnnnnnnnnnnnnnnnnnnnnnnnnnnnnnnnnnnnnnnnnnnnnnnnnnnnnnnnnnnnnnnnnnnnnnnnnnnnnnnnnnnnnnnnnnnnnnnnnnnnnnnnnnnnnnnnnnnnnnnnnnnnnnnnnnnnnnnnnnnnnnnnnnnnnnnnnnnnnnnnnnnnnnnnnnnnnnnnnnnnnnnnnnnnnnnnnnnnnnnnnnnnnnnnnnnnnnnnnnnnnnnnnnnnnnnnnnnnnnnnnnnnnnnnnnnnnnnnnnnnnnnnnnnnnnnnnnnnnnnnnnnnnnnnnnnnnnnnnnnnnnnnnnnnnnnnnnnnnnnnnnnnnnnnnnnnnnnnnnnnnnnnnnnnnnnnnnnnnnnnnnnnnnnnnnnnnnnnnnnnnnnnnnnnnnnnnnnnnnnnnnnnnnnnnnnnnnnnnnnnnnnnnnnnnnnnnnnnnnnnnnnnnnnnnnnnnnnnnnnnnnnnnnnnnnnnnnnnnnnnnnnnnnnnnnnnnnnnnnnnnnnnnnnnnnnnnnnnnnnnnnnnnnnnnnnnnnnnnnnnnnnnnnnnnnnnnnnnnnnnnnnnnnnnnnnnnnnnnnnnnnnnnnnnnnnnnnnnnnnnnnnnnnnnnnnnnnnnnnnnnnnnnnnnnnnnnnnnnnnnnnnnnnnnnnnnnnnnnnnnnnnnnnnnnnnnnnnnnnnnnnnnnnnnnnnnnnnnnnnnnnnnnnnnnnnnnnnnnnnnnnnnnnnnnnnnnnnnnnnnnnnnnnnnnnnnnnnnnnnnnnnnnnnnnnnnnnnnnnnnnnnnnnnnnnnnnnnnnnnnnnnnnnnnnnnnnnnnnnnnnnnnnnnnnnnnnnnnnnnnnnnnnnnnnnnnnnnnnnnnnnnnnnnnnnnnnnnnnnnnnnnnnnnnnnnnnnnnnnnnnnnnnnnnnnnnnnnnnnnnnnnnnnnnnnnnnnnnnnnnnnnnnnnnnnnnnnnnnnnnnnnnnnnnnnnnnnnnnnnnnnnnnnnnnnnnnnnnnnnnnnnnnnnnnnnnnnnnnnnnnnnnnnnnnnnnnnnnnnnnnnnnnnnnnnnnnnnnnnnnnnnnnnnnnnnnnnnnnnnnnnnnnnnnnnnnnnnnnnnnnnnnnnnnnnnnnnnnnnnnnnnnnnnnnnnnnnnnnnnnnnnnnnnnnnnnnnnnnnnnnnnnnnnnnnnnnnnnnnnnnnnnnnnnnnnnnnnnnnnnnnnnnnnnnnnnnnnnnnnnnnnnnnnnnnnnnnnnnnnnnnnnnnnnnnnnnnnnnnnnnnnnnnnnnnnnnnnnnnnnnnnnnnnnnnnnnnnnnnnnnnnnnnnnnnnnnnnnnnnnnnnnnnnnnnnnnnnnnnnnnnnnnnnnnnnnnnnnnnnnnnnnnnnnnnnnnnnnnnnnnnnnnnnnnnnnnnnnnnnnnnnnnnnnnnnnnnnnnnnnnnnnnnnnnnnnnnnnnnnnnnnnnnnnnnnnnnnnnnnnnnnnnnnnnnnnnnnnnnnnnnnnnnnnnnnnnnnnnnnnnnnnnnnnnnnnnnnnnnnnnnnnnnnnnnnnnnnnnnnnnnnnnnnnnnnnnnnnnnnnnnnnnnnnnnnnnnnnnnnnnnnnnnnnnnnnnnnnnnnnnnnnnnnnnnnnnnnnnnnnnnnnnnnnnnnnnnnnnnnnnnnnnnnnnnnnnnnnnnnnnnnnnnnnnnnnnnnnnnnnnnnnnnnnnnnnnnnnnnnnnnnnnnnnnnnnnnnnnnnnnnnnnnnnnnnnnnnnnnnnnnnnnnnnnnnnnnnnnnnnnnnnnnnnnnnnnnnnnnnnnnnnnnnnnnnnnnnnnnnnnnnnnnnnnnnnnnnnnnnnnnnnnnnnnnnnnnnnnnnnnnnnnnnnnnnnnnnnnnnnnnnnnnnnnnnnnnnnnnnnnnnnnnnnnnnnnnnnnnnnnnnnnnnnnnnnnnnnnnnnnnnnnnnnnnnnnnnnnnnnnnnnnnnnnnnnnnnnnnnnnnnnnnnnnnnnnnnnnnnnnnnnnnnnnnnnnnnnnnnnnnnnnnnnnnnnnnnnnnnnnnnnnnnnnnnnnnnnnnnnnnnnnnnnnnnnnnnnnnnnnnnnnnnnnnnnnnnnnnnnnnnnnnnnnnnnnnnnnnnnnnnnnnnnnnnnnnnnnnnnnnnnnnnnnnnnnnnnnnnnnnnnnnnnnnnnnnnnnnnnnnnnnnnnnnnnnnnnnnnnnnnnnnnnnnnnnnnnnnnnnnnnnnnnnnnnnnnnnnnnnnnnnnnnnnnnnnnnnnnnnnnnnnnnnnnnnnnnnnnnnnnnnnnnnnnnnnnnnnnnnnnnnnnnnnnnnnnnnnnnnnnnnnnnnnnnnnnnnnnnnnnnnnnnnnnnnnnnnnnnnnnnnnnnnnnnnnnnnnnnnnnnnnnnnnnnnnnnnnnnnnnnnnnnnnnnnnnnnnnnnnnnnnnnnnnnnnnnnnnnnnnnnnnnnnnnnnnnnnnnnnnnnnnnnnnnnnnnnnnnnnnnnnnnnnnnnnnnnnnnnnnnnnnnnnnnnnnnnnnnnnnnnnnnnnnnnnnnnnnnnnnnnnnnnnnnnnnnnnnnnnnnnnnnnnnnnnnnnnnnnnnnnnnnnnnnnnnnnnnnnnnnnnnnnnnnnnnnnnnnnnnnnnnnnnnnnnnnnnnnnnnnnnnnnnnnnnnnnnnnnnnnnnnnnnnnnnnnnnnnnnnnnnnnnnnnnnnnnnnnnnnnnnnnnnnnnnnnnnnnnnnnnnnnnnnnnnnnnnnnnnnnnnnnnnnnnnnnnnnnnnnnnnnnnnnnnnnnnnnnnnnnnnnnnnnnnnnnnnnnnnnnnnnnnnnnnnnnnnnnnnnnnnnnnnnnnnnnnnnnnnnnnnnnnnnnnnnnnnnnnnnnnnnnnnnnnnnnnnnnnnnnnnnnnnnnnnnnnnnnnnnnnnnnnnnnnnnnnnnnnnnnnnnnnnnnnnnnnnnnnnnnnnnnnnnnnnnnnnnnnnnnnnnnnnnnnnnnnnnnnnnnnnnnnnnnnnnnnnnnnnnnnnnnnnnnnnnnnnnnnnnnnnnnnnnnnnnnnnnnnnnnnnnnnnnnnnnnnnnnnnnnnnnnnnnnnnnnnnnnnnnnnnnnnnnnnnnnnnnnnnnnnnnnnnnnnnnnnnnnnnnnnnnnnnnnnnnnnnnnnnnnnnnnnnnnnnnnnnnnnnnnnnnnnnnnnnnnnnnnnnnnnnnnnnnnnnnnnnnnnnnnnnnnnnnnnnnnnnnnnnnnnnnnnnnnnnnnnnnnnnnnnnnnnnnnnnnnnnnnnnnnnnnnnnnnnnnnnnnnnnnnnnnnnnnnnnnnnnnnnnnnnnnnnnnnnnnnnnnnnnnnnnnnnnnnnnnnnnnnnnnnnnnnnnnnnnnnnnnnnnnnnnnnnnnnnnnnnnnnnnnnnnnnnnnnnnnnnnnnnnnnnnnnnnnnnnnnnntaaatttaaagcgattctaggcttataactaatagaaaaacggtggtaaggtaaatgtatatatagtagaaaaatctcaatcaattctctaactctttaaaaataataatagtccagaaaatataacaatctaatagataacttagtaatcaaataaataaaacaaaatgaaaggatgtttttcgggcagaaaaccagcctagtcagtcacatgacccaactgtatcagggatgaaaaatgacagtattcatcctagattctgatagaaactaatagctacttctctaaagaaacagtatataaggataatatataggttataggttatataattaaaggaggctatataggtagtatatacagctcctacctagtccctagtcccctacgtaccttaatagatataatacctcaggtatcagccttcttagtactagggtcctaacaataggccgggctgggtcaggttaaaacaggctttagagaagtctagttataagcgagtaggcatatgaaagaggaagcgaaaaacatatagaaagtaagaagtatatgaagaagagagaaaatcaggatatagagcgaaaacgcgatatatacccgttatagacgaattcccactggctcgttttgtagggcggtatatactatatatgaaggcggtatacaggtagggctttagggggtgttgaaacttatgaacagtcactgtacggtttggatttaacggatatatggagatctcgaaacctaagtattatttatacgagtgatctcgccggcttacggccatcgagatagtcgttgccgagcaaagcgactgattctaacttctaatgctgcgcaaagcccccctcttactggcttattggtttcacagcgacccctcggctagagcaactcccctgcttttatcataattctaggagaaaacctggccacgtgaaatgtacgtaagaccttctgatttatacttgcttcgcttcaggagcatcccggagaattgaacaacggtaggcgggccgttcagtgtacgaatagggaatggacgcgttcatagagaggctgccccgtgtggctgataaatgataatgcaagttacaagagcggctctgcgatcgcgtgtcggtgtatgatgacatcactctatttatggataacgaaacagtttaggcgcctagcgcaggcagccattcaactacaacatatgactcaactttagacctcgggaaagaacatagatgagtcagatccaagttaccctataaatggaagtactcaagaaaggaagttatactttatgaaaagcgagcgcaaaagcaagaacagtatagcatgtaagaggcaagagggcaagaaggcaagaaagcaagaaatcaaagataaggatctacaccaatagatcacatggtacagggggggtcaacgctcgaaaatgattggctgacccctcctgcggctgatcctattaggtgattgcccgcatgggatgttgtcacatgtgaccggacttaggcaggaaaatcaggtcacattaaatccgaaagttaccgtaaccttacacaggctactagtagagattgggcatatctacaaaaccatgctggtaaatagatatcaacatcgagtaccggagaccaaccaaaaataccatggtatggtatcacccgagtacccaaatgatgagatcagctggtccttgccaaatgacgcccaagcacaatctttcccctccctcagatccccttttgcgctctgatgccctcccaactaaaccattttacagtgagtccattggtctcatgagtccctcccctggagaaactcggaatctccgttaagcgccaccccgcagtttatcatcacaccctcagccccatcccaactgactcacagttcgctttcaatattcccttcaacctgccctcccttttcttcttcctttcccccttacccttctcattttccatttggtccattctcgctcgatggactattaccctattcatcaaattgactcattcggccattggagccttaaccccgagacttaggtcatattggcttatcgccacctgagagagacaaagaggcagaccctgacaaatcacctgttttgcctggtgattcaacttccattgagttccataaacactcgctcatcagctttcgccatccatcttctcactctgcctggtgtattcatcccctcccctcctctttccagaaaacctagccctggacaccattgacacaccattgactactttaacctcttattaccaattaccgttggctcaacggtatttaatctggaatgacttcgtccgctggctggaaaccagccgaccagccgaccactatgcatcgtctcccatccgtttctagccttatgtcacccccagagaccaagcctctcgagagctttcctgtctcgctttcaccgtttgcaaagcctcgagattcttcaactcgtgacatacagcttccacccatctcagatgatcgaaaacggacccagtcagagatggacctcccgtcgccacctgtgactccgtacaccgggaacaagaagagcaatcccaacgcctcggaccagattgaaagggatttgggatcccccagggaccctgtccttttcccccctcaggattccggtactgacgttgctacggatgagccactgttcggccccgttcaccctccatctgcagaggcacttgtggaagagcacatgaattctcatatggcaatctttcgcaataagttgaacaaacccacacgggatgaatatctccttgcgctttcctgtgtccctattgtttcgactcagtacaatcgcaacccgggtgtttgggcccgagaggaacgcgagacgttggagcgccaaatggccatgatgaaccgttatcgatcaggagattacgagcccaagttgaagaagattgctcctgctccggtgaaaagactaggaacccaaccgcgcgtgcagcgaactcgggtcaaacgcacccctaaatccacacccaagcagcaggtgtttgataactttgaacccccccaaaccccgcttaccaaaccgcgtaccttgggtacgaatcgcgatgacaccgattatcactcactcaaggactactcgcccccggcagagacgctaggcagtaatgccaaagcattgaaggctgattggaaggggcagatgttagatttgagcaatgacccggacagaaatattctcagtcccgccgagctcaatctcgcatctaccctgagactttcatgtgcgacctatctatgcagcaaacgtcgaatttttgaagctcgagttcgagctctcggtgtgggcaaagagttccgtaagacggatgcccagcaggcttgcaagatcgatgtcaataaagccagcaaactttggaccgcctacgaacgcgtgggttggtttagagctgaatattttcataaatacctagcatgatattgcaggttacgtgtcttgatggtactgtggataattctgccagttcatcacagcccgtgtgtcgcctcccatcacaggctaggcactaactgaccttctacctcaagtgtctatcactggcagtacagccctcgactattaatccatatttgagtgctctcggctatctacacctgaccaagacaaacacccaagtgttccctagaatcaacccaccttatctcttggcctgtcgatttccttttcaattgctatctcgcttttacgactcatcatgacacattcttttcttttgagattccccccttgttggttttcttttcgttttgcatacaggccccatggctttgattatttccaactttggctgctggcgtttgggtgcttcacttcagtttcgctttggtctagaatggcaggcttggttacccacgggtgttttcttttcactattgcgattgaattttactgcttggtcgtttccttttctttcttcctttttcctcgtctttgttttggaaaggcagcaatagcacataggataaggcttgataccctgaccggatatggttttcctatattacaatgaattgatatgaaattgagcttaagatacaattcacaaaaaagatacatactagttaatatatctatcatctgtagttgacatgcccaattgatatgtttctaatttaaaccgaaataaagcggtggggcgcaatcgtaatcctccggcagcccggcgccaccttttttttgacgtatcccttgtatcatcttttgcttcactccaatctggatcatcaatttccctctttgaaataaccttagtcaaaagtaatgtctcagcaagtgactcgttctgggtccatcgaggaacaggaacgcgcaagggaggagggcgacaagaagccaaagtctcgccgaccagccagtaggtcctgggatctcatcaaccctctgtccacaactaactgtaccagatactgctttccgccagcaaagattgaaagcgtggcagtgagcttgagatttccgtatatctgcctatggagcaccatgctaacatctcactaggccaatcttaacccctaaaagcgttctacctctgtttttcatcgttggcattatctttgccccgattggcggtgttcttctctgggcaagctctctagtatgcttcgttttatacctttgcgtccttggcagaacagctctgacgagctacgtgctctaggtccaagaaatttccatcgattactccgagtgctccagcaaagcaccgaccgacagctatgcctccgttcctcattattccgcgaccttcaaatcttctacagcaatatcggcacccacctggcgaaagtccatcaatgagtcttcgggcaccgttacttgcactcttctttttgagatcccgaacgagcttccagcaccagttttcatgtattaccgcctcactaacttctatcaaaaccaccgccgatatgttcagtcgctcgatttgaatcagcttatcggagatgctgtctcctacaatacggtcaagggtggcgtatgtgacccattagcggtcaacaccacggctcagaaggtatactatccatgtggactgattgcgaactcattcttcaacgacactattgggaagccccaaatcctaaacccgaatgcacctgagaatgataaacaattctatgaaatgaccactaagggcattgcgtgggcgagtgataaggaactcatcaaaccgacaaagtacagtatggatgatgtactgccaccaccaaattggctttgggccagcgagaacggtgtctataaagaggatcccaacttacatgaaaatgaagctttcatggtttggatgaggaccgctggcttgccatcgttcagcaagctttcccgccgtaacgatacccatggcatgcctgctgcaagatattccattgacattgttgatcgtatgtgttaatactgccgcttacccatatcttactaaaattttcaggtttcaatgtcaccgaatacgatggaaccaagtcgatcttgatctccactcgaacagtgcttgggggcaagaaccccttcatgggaatcgcctatgtggttgttggtggaatctgcgttgttctcggggctttgtttactctcgcacatttggtgcgtccgaggtatgatctcctttctttgtgggcagaaactccaaactcctaacctacttactagaaaacttggcgaccacacctatcttacttgggactcaaatcagccgagcactgctatcgccacgggacgggataatgccccttgaaccccatcttcctgctctttgttcggcgttttttttttttttttttctgtttctgtttcaatatgccctgtaaataacccctgtgtttaatgacctcatcctcaactttctgacataccaatcgtttcattttcttgaatcctacgtgctcctagcccttgctcaagacatgcattcctcgcgagacacagcattcctgatgggatctggcaggctatatggtacccgcgaaccggtcggtcttgagattgatggttctttttttgactctttatccactccttctgtttttctcttttggaacaggtgtaaaaggggagttcaaaaccagggtttcttaacatcatggtgtgtcactcatttttccaactcgtcatcttcatcaccgttttcctgcaggcttggtgtagcccctttgcactccagaaaagaggcgcctgtgctaccgaagaccccggtgcaaatttcttgcatgaagtaaggcgcctccaatcggatgaagccgatcttgctatttcgcaggccaggaaggccccgatcgagatcgagacctggttccatatcatcagcagcaagtcggagtccacccaggtcactgataatatgatcaattctcaagtcagttgcttcttttctcgactggcatctcagtgctaattatttacctacagttttctattctacaacaatcttatgcagattctggcatctcctaccgattgcaaggtgtgactcgtaatgtcaatgataagtgggcgagcaatgcggatgatacggccatgaaaacgactctccgaaagggaagctaccgaacattgaacgtttacttccaaaccgatctgcaggcctcacccgaacaagcgggacgtgctttcgggcacaggggtgcagtcaccaacaatgatctggcatcaagcgttcttggattctgcactttgcccgatccgagtgtcaatgctagtagcccggcttctcaatatatcaaggatggctgcaatgttttggccaaaacaatgcctggtggctccttggatctgtacaatcgaggcgggactgccatccacgagattggacactggaatggccttttgcacaccttccagggggaatcttgctcagtagataatcctggtgaccacataagtgacacgccacagcagtccaccccgacagatgggtgccctgaccagaaggattcttgtccagactcccctggattggacgcggtccacgacttcatggattattcatccgatgtatgttatgagcgcttcacgcccggacaaggagagcgcatgcggagtatgtggatatccatgcgtgaaggtaaatagcgcaacagtgacgggcaataaggccaatacaagctctgtatggagtccattcgcagccatacatgtacacgcagaagccagccggccaggctagttggttacgattcagagaaataatacctgtctaatgagctgttggacgaatttcatgtatgaatatttggctacagtacagttgagaggcgttaagagactagtttcctcccaattaacaccataaatgtgtcttattctgatcccatccaccgtgggcccgagtcaaatcgtacaagtattcgaaaggcaatcaagagatgcaaggcattcgtagcccaacttggcttgcccatagattggaacatggagtacaagaaagggagggaagaaaaagtcattttgatgccccagcggcaaaaaaatggtcgattaccgcttgcgcttgatcccgcggtcattgtcttcatggtcggcctccttgtctttacgtttcgccttttcctcaagggcgtcccagtcctcaccactttcctcgtcgccactgaagtcttcttcgctggcatcggcactcgcgtcgtcatcaaattcgctgtcttcctcagaactctcgtccccagctgcaagctctgaatctgacaactcgaaagccgactcctcttcctcgtctgacccgttctcagagtctgattcggccgataagaaagaccatccaccatcggcaaagaagccgtatggatcgctgacaactgttttcataatcgtggtccaattcaggttgagcggaccctcggtgaacgcaatatcaacagaatcaagccagtccttaacaccctcaagtgcctcaacaggaatcgtgttgatatgaacgggagtccggcggaaatccttaaagacgaagaccatgtcgaagtttttgagtccaaactgcacagattagtaaaccaggctgatgaaatagtagaagtggtaatcattacctgaactctctccagatgggctatttcgatttcattcaatgtgacggtcgtgaaaggaggttcagtgagctgaactagggcatctgtggtgggttgaatcaagacattagaccggtttggaacgccggtaaagccaatttccctgaatgggatatcgacatcgacgccctcgtccttgccagcgtccgcaaccttctcggcaaatgccttgaactcgcggtccaatgcagctctccgccgtctttcctcctgttcagcctcaaattcttcctcatctccgtagcgatgtttgcgccgacggtttccagtttcatcaaattgcatttccgtggcctcgcgatagaattgaatatcctttgtcttccgctttccaatcatgatgggcgtcttgagatgcacatggataagaacgatcaattcatgggcacatggttggaagaacagatgcttcacattgctgaagagcacatcgacatgctcattgcggaaaggcgataggtaccggagaccattctgatgaatttcgacttctcccggaacacgcttcccatccaaaggaggccggagatagacgtcagggagtttcactggacgtcggtttctaatttcaaccagtttatcctgctcaacaacatcctccaattccttcttctcctgctctcgtctcagggccgtcttgcgaagttcggtgatatcctgggcaactcgtgcaagccggtcgttatccttggatcggagggtgagattgcgaacaaaatgagctgataggtcctcaaagggctggtcatcctttcggcccacaccctgacctggagacaggaagttgattcgtaggtaggcgtattccccttcgtcgcttttgctggcgttctttatggtgttgatatggaagggaactggtcggcccatgataggcacaatcacggttgaagtcttcaggtcgacgtaaactgtaaggtctttgaccttggcggggagttggttgtctcgcttgtaagactcaaagcgcttgaatttcttctgtgccaccccattatcgtctcccgtagtaccggtgaaccgatccaaaccttcctttgtcttcttcaaagccagctctttttggtgttcacgacgacgggcttcagctccctcattgacctgagttggtctttcagcacgaagtttggttcttgtgacgtttctgccagcagttgcgctagatttcgtctcctttttctctttaacaggcttctctggctcttcctcatccccgaagtagaatgagatcgagtccatgtcaataccggcgtctttggtaaaaatatgaggcccattttcgccgacacgaaccgtatcggtgatgaccatggaatatgcaccattcttggcattcttggagtctggatccttaacatcagtaagcccgatcgtgatagacagtgtcatgccgttcttcaagacgcggttgttcttggcattgaggaccatattagcatcccgcagctcgattccaatccctgcgccaacgttcttaacaaagtgtccctccagctccggcttcttagaccggacgagactcagtgctttgttgtaaacgtccttggcgaccacaccatctcgaacctctttcatggttgcttcatggaggctaagcagtagggcatagttcgcttcttgtgattttgttgggtcaaccagatatgtgcgcccaataagcgaactgtaggtcttgtatctgattccaaagctggacaaaatgataccgggctcgaggtttttattgtcgggagtcgctgtgagcttgagatcgtaggcacctccactttgaattacaggtccgtaggcccagtcaatttgctgggaatcgaattccgagggcagccgcgccagcttgttgaaaaatttcccatcatcaatctttgcatcaacctttgcggcgagggcttcatgtgtcatcttcttttcctcgtcgagcaaacgtgacatctcatcgacgaagtactctgacataaggccactacaagctctggaagcattgcggattgagaccttttttgagactgtgtcagcaagcaccacccgtgaaacgcactgacatagaaaaactaaccaattcatcagaatctttgatcgcaaaagcagctgagagtgcaggtgctatgtcaacttcctccacctctttcgatatttctgcgaatgtgcgcttccattcatctgcgaagggtcctgaagctgtatttttgggtaaggtgccgactttattctgtagttattgcggttagagtaaggcaaatcgaaccggtgatttaaatgtcattttagctcacccctgcgcccttgataacatccaagcatttctcaaatgctttggtctttgattctgggtctttggtagtgaccagaatctccacgggaatctttccttcttttagcggctcaaggtgtttcgcttaaatttgatttaattagctatgtggcgcgcagaagtccatgtgttgataatcacctttcttggctgtggtgaccacgtaaatcgcctcagttgtgagaacaaatagtgtcgcagggaattcatacccgagaagccagaactaatcacgagttcataagtaacgatgttatgaagctcacgggccactgtgggacacggatagaaattttggaggtgattcacatacatgcatcgcgttgttcttctggaatgagttctcctcatcagtcttacccatcagaatgactatggaccctgcattgccaaatagggcattgcccgagcgcttgtcggccttccatgacgcatagaaactagacaggcggttgaaaaagttgttattgtcaatggcaatctcctcggccatggtgatggtctgatgtgagcaagatatgccacagtcagagactaagttgatggcaagagagcttggtggagaagcgcaggagctgttgtaggtatgtccgagtgctgaatttgttgaggatgaaggagagggaattaaggtagcatcaatgcgaccactgcgatgatgatagaccagacaccaatagaactaggttgtggaagaaaagacaaagacagaaagggacggcttaggggaaagtgaacgcgaaaagcgcgttcctgcactctaggtctctctatattaccgtatcaaagtattaccactttcatactagcgctgttttcatgtctctcgaatccgaacatgttttatgaatatctcttctcactgactttctttctatcttcaactttcaagttaacatggcgtatgtgagccttcacttggtcgtctaattagataacaaacaccctgtgatgctgccctcttttcccgcccacatcgcctgcgctttggaattcactatcgacattgagccagtctctctttgacaagcacccttttctacgatgtacactggctttttagttgtctgtaaacaatgaactctccgatagctcccatcctcctcgagcctcacctcggcgaacttcctggaagttcgcggagggtttttcgcaacgcagcnnnnnnnnnnnnnnnnnnnnnnnnnnnnnnnnnnnnnnnnnncatcctcctcgagcctcccctcggcgaacttcctggaagttcgcgaaggatttctcgcaacgatgcagctaccggagcatctgccgccggcgttcgcgctctcagtgcacagatggtggccttttacttcagagcaccgatcaaagctttctttcgtatgcgtgttgagtatgtagtatctatggacctgaagatctttgtattgacaatatttcacctagttatatggtaagaaacacgaccaacccatcaccagccttggttgcttatcatttgaaataggcatttgcgagagctgtgaacccacgtgtcgccgaaggcaaatggtctctgcatacgacaaccccgggattattgctccacgccgttcggacatatggctggcggtttatcccgaaccaagtgcttccaccattgatggcaaatgcagggtgacatataccagaggatatggccccaggtgattcaaaaacgctaacgatatagatcagggttggtgccgttctctacacgtcctatctccaagttttgggggccctacatgaacctgtgtcccaaggggtgaagcgagtatggcccccggctcctccatctgcaacattcgcagctggattcatagccggcacaattcagtcgattgtagccgcccctctggatgccttacaagttcgctttcaaaccaatgacatgctggagggtcagtaccggagtatgtggcattatggtcaccataagctcaaacagattggtctccgtggggtctttgcgggctggagcctgtcgttcatgcgggattcactcggctatgctgtgttcttctccacgttcgaatacatcaagtcacagtcctactattcattcgtcacttggtactatggctccctgcaagtcgatcatgtgggcatgctttcatcgtccaggtctagtgatcgtggtgtgccactcatcaagccccactatgcattggagccatgtttcctgctgatggccggtgttgtggcatcggtcgctcagcaaaccattcagcatcctataagtaggattcaagaccttcaccttggtcgtctggaatatctggatcaccaggccagcttcataccctcgcgacagaagatgatacaattctactaccatgcctatcaagagaccttcaagaggtgcgagcggaaggttgcgcgggccgggggctggcgctcctggttgttccgtggatttgtcgggagctctcttcgccaagtacctagcactagtgctggcctgatcatttttgaattggtgcgccgacggtacgcgaatcccgcagacgctgtccatattcagagtgatggatatgatatccttctcacttaatggcttatatgacaggtttttttccccctcgcgtcttttctgtttgttgtttgaacttttttatccttggtcattccgaagagggcgttacagacatagaatatgatttcattagacgtatatacatttatgtacatacaagcgataccctacttcataaatatcttcctggtaataagtagttaacgtaattcacatacgagccgccaccacatacgacccgccaccccatccaaaaacgcgtccatgaattagcacctagttaattcaaccacccaccatgccaccaaaacgctctcaatcctctaaagattcaatagagaaagagggtaggatcttattagctatccaggcttttaagaatcaagaattttccaatatttctactaccgcccgcacttttaacgtaccgcgttcaacccttcgggaccgcctcagtggtatacaacaccgcgcgacaataatacgcgacttctcgcgccaacttgactaaattaaccgcaattgaagaggaatctcttcgaaaatggataatctctatggattcttgtggatcggccccccggccctctatagtacgagaaatggcagatcttcttcttaaataacgcggaactaccccagttattttagttagctaaaattaggttatatattttattaaacggtaccctacccttatatcccgattcttaagacgttataattataagtgcgcgaaatgtaaagacctaaggattattagagagtggtttaatctagtttaaaaaactattctttagtatagaatcgatctagataatatttataactttaacgagacaggttttactataggattaactataatagcaaaagttataactagaagtaaatactacagttagagattacttttataacctagaaatcgcgagtaggtaactataattaaatgtataaatgcggtagggtaggcgcttcctctatatatgatttttaaaggcaaagtctttattaaatcttagttnnnnnnnnnnnnnnnnnnnnnnnnnnnnnnnnnnnnnnnnnnnnnnnnnnnnnnnnnnnnnnnnnnnnnnnnnnnnnnnnnnnnnnnnnnnnnnnnnnnnnnnnnnnnnnnnnnnnnnnnnnnnnnnnnnnnnnnnnnnnnnnnnnnnnnnnnnnnnnnnnnnnnnnnnnnnnntatattaataaactcgactttcttaaagtataccctactatataaattaaagcttttaaatcggagataattaaaaatagcttcttagcagctggtttagtaccctttttacctaatcgggtactttcgaagctaaatatctagcttcgaatacctaccccccctctgagccagggtagtgacttaagccggaattttatactaaaaacccctgctaccaggaaagatctatatcgataggctttgtcaatcaatgctttactttgtatataatctcgaagcctaataagtccttctaaacgtgcattaaaccaacttatcaaaggctgccaagttataatgtataatactattctactagcgaaagaaaataaggagttacaggatgaaaatgagaagaagaagtaaaaacggacccgatctagaaggcagatacccgccgaagaaggcctctctgttcaagaagcatctgtattaattatacagtaacaagaagcaattgaagcacctccccccagccccggcatgcctagagaatcgactattcaaccatgtacgcgcccctcccgggggtgtggaatatgcagattgccagggcatagaagagaaacatgtccagatagaccacttagttagttgatttaatttaatggcgttatggttgagataaatgcatttaaaaactagattgttgaatggggtggcgggtcgtatgtggtggcggctcgtatgtgaattacgttagttacttagttagttaactaacttagttatatgtattagtaacctatttgtcgatctatcccggattagacgggacgatacgatctagtacgtattagtactagtacgtactccgtatgcgtacagatcatcttctactactctggactagttattaggatggcttattctctcttctctctttcatacttctatttgacgaaaattactattctaacctagctcctcggaaaacacttgatgaaaatcatctgaatccctctgtcctattctatatttgacgttttggccgtgtaatactctcacttttttgcccaaacgcaccccctctccccaaatctccgcctgaccgtcaccccatttcgacggtacttcgtcatcttgcgtcgcgtgtgactttacgtagctagtcgcccgtggccacatcgcctgagtggcgccctatcacggactaatatagtggcttccaaggttgtgcccaggtggtaccgttgctgactccttgcggagaacgtcttatcgatatcattaattccatccgactccgcattcttttctccgggacaaagggctgcgaggttcagcccgtcaatatcgccatcatttctccgacttctccctcacgcgcctctaacatacccctccagtccataccctctgattctcgctcgatccattcggccaaattattggagtctaacgagaagggtaatcgacggtcttcccattcgtctgctcgctcggtcgggtctgacgtctccatctggtcagataccggtgacctcgccgagcagttcgctgaggctgaagatccgctacagattcaccttctcaattcctcagactgccggctcttgcgtcaaaaagagcgaagggagcagcccaaacacgtccgctacccttcaaacttgaacaacgagcgttctggcgtcgatattgaaaagatcaaaataccagcccctcccccgcgacatatttcgagagttgaacgcgtgctggccgccataatgacacccagagatggaccaaacacccagatgcacggcttagtcggaaaaccattactgtgagtgtcttaaaaggccaataccgtaatttttaccactgactctggtttgcatgtagttacttcacgagtgtgtttgtatcactgggtgtctttctctttggctatgaccagggtgtaatgtctgggatcataacgttcgtgtctaatccctcgagcatagactcgccataaagataacgaggagcggaatgtggctaacagatacagtggctggtacttcaaagattacttcaaccagccttctcgggctacaattggcactgtggttgcagttctcgaaattggtgcattcatatcctcgctccttgtgggtcgtatcggtgatgtgatcggccgtcgaaggactatactctatggctccattgtgttctttgttggcggtgcttttcaaacattttccacgggtatacccatgatgatggtcggtcgtgtgattgccggtctaggcgttggtgccctctctactatcgtgccagtttaccagtctgaaatatcggtttgtactcccatttctccatcaatcctcaaggctttttctttgtctccctccccattctatcgccaggtacgctgacgaattttaagcctccccacaaccgtgggaagcttgcatgcatcgaattcaccggcaatattgctgggtatgcgactagtgtgtgggtagactatttctgtagcttcatcgataacgactactcctggcgcctgccgcttcttttccagtgtatcatgggtgccttacttggagttggcagtctgatgatctgtgaatcacctaggtgagtagaaatcccatccattgtctgctaaggctaactcccaatcctttccttaggtggcttcttgataatgaccacgacgaggagggtatggtggtgatcgcaaatctttatggcgaaggcgatctcctcaatgacaaggcccgtcaagaatatcgtgagatcaagatgaatgtccttgtccagcgacaagagggtgagcgatcctactcggacatgttccgccggtatcgcaaacgtgttttgattgctatgtcggcccaagctttagctcaactcaacgggatcaacgtaatctcatactatgcgcctctagtgtttgaatcggtatggacctagagtctccctccatggtgctatgccggatacaaataatattcaaaagggttcaggattatgctgaccaatctaccatataggccggttgggctggacgggatgccatcctgatgactggaatcaatggtatttcatacttgctgtctaccataccaccctggtatctcgtggatggctggggccggcgaccgattttactcacgggtgccgttgccatgctcatttcgctttctcttatctcctactttatttacatcgagattcccgccaccccaaccctgacggtgatcttcgttatgctctataatgcagctttcggggcatcctggggccccattccatggttatatcccccagagattttgcctttgagtattcgtgccaaaggtgcaagtttgagcaccgcttcaaattgggcattcaattggctcgtgggcgaggtaacacctgttcttcaagaagttatcaagtggcggctatacttggtccatgcattcttttgtgcatgcagttttgtgcttggtagggtccctcatccgtggtcatctactagggaccatcatactgactatcaccacagtctattttttgtaccccgaaacgagtggggttcgcctcgaagatatgaacgttctttttggcgatgcttccactgccatgccaacacccgccacccaaggcgaacgggggtcgctaatgggtgctggttcacccgtcccatcgctcgacctgcgtcggcagtatggtcaatttggggcagataattccatccctggcctagatattgatccgccgacttcaagccacgagggaactagcaaacgcggacgctcaaattctcaccagggcagtgtccgcggcgaaggaattggtggctggatctcaaacatggtcagtcgaaaccgaggagcgggcgccggtgctaccagcagtcaatatagacgtttggagcaaggagaaggcgaatgaaatatttacgggtaattgtggccttggactggatagaggaagcaagaaaagaccaaagaatccgatgttatatatctcctttccccatctaccaatgccttctgttgatctcgagttcacgttcacggtatatacctatcatacgaggctttgcattgatgttgttctggaattttcttgttacatatgtgtctgtgccaatgatttttatatatatataaataaaatatctagttataatacatgtactataaatgattggtatatttatagcacggagctagaattacaagggccaatgttctgaaaacggcccgctaaaagtggacttgtttatcctccctgaggccacggatctcactttctccttgattccctcagcccactctcttgtctcacttcacttcacttcacttcatttcatttcatttcgttttctttttctttttctttttcaatctacttctggcattgcttccggtttatccgctagatttgcccccattctatcactcacttacccaggggaatggctatgttctcttaaatctatctgtccttctattaccggtctacctcggtattccccagtttaatttcttactattctcgcattttgttggtacattttctttcgaaaattctacaagacacacacacacacactatggtgggcctagacactgccgtgagcacgggtgccaaccatgagtccgacctccgtcgaagaaatgtccctgatattagcaaagttcatctggactccaatcggacgaatgacgaagatgtgaagaaagctagaacacaggtgaggtagccttcttgaacatcatcatccacgcccttctaacctcccctgaacagtcaccctcgttcctccatgtgctagctaactgggagccgatcattgctcccatcctcttgactgccctcgcactcttcacccgcctgtaccagatcggccgttccaacattgttacctgggacgaggcccacttcggtaaattcggttcccactatctcaaacgcgaattctacttcgatgtccacccgcctttggggaagatgctagttggcctatccggatatcttgctggctataatgggtcttttgaattcaagtctggcgagaagtatccagaagatgtgaattatacctttatgcgagccttcaatgctgcctttggtataatctgcattcccctggcctactacactgcgcgagagttgaacttccgtcggcccacagtctggctgatcagcctgatggtgctgtgtgagaattcctatgcaacaatttctcggtttatacttctcgactcgatgctgctctgcttcacatttactacgacgatgtgctgggcaagatttcaccggttgcagcgtgatagcttttcgctagaatggtatgcctggctctgtttaaccggtttgagcattgggtgtgtctgtagtgtcaaatgggtcggtttcttttgcactgctcttgtcggtctctatactattgatgacctgtggaataaatttggcgacctaaagatgccacgggtgagtacctgctatcagccccccttgcctagaaggtgatcaccgattagctggctaatgcggacgtgtttggacaggctgtactcgcaaagcacttggttgctcgtgttgtcggattgattgttattccgatcttggtctacatgttttctttttatctgcacttcttagtgctggcgaacagtggtccaggtgatgcccagatgagctcgctttttcaagccaacctacaaggcactgaagttggtagagatagccctcttgaactcgcaattgggtcgcgtgtcacacttaaaaatatgggatacggaggagggcttctgcactctcacgttcaaacttacccggagggatctatgcagcagcaggtcacctgctaccaccacaaagatgccaataatgactggttcatctaccccaatcgacaggagccggactacgatgccactgctgatctgcggttcgttggtgatggcgatgtcattcggttgattcacggacagacaggtcgtaacctgcattcccatgctatcccagcaccaatcaccaaatcacaccacgaagtgtcatcttacggaaatatcaccatcggagacgacaaagaccactggaaagtggaggtagtcgatgatgttgcatcttgggaccgatctaggatccggacactcacaacagcattccgactccgccaccctgtcctgggctgctatctacgggcaggaaatgtcaatctacctcaatggggcttcaagcagattgaaacaacgtgtaccaaggaaaacaaacccggcgatgtgtatactcactggaatgttgagtctcacaccaacgaccgttgtaagcttatccttttgccaaacacttgatattgatgagcccaatcagacttattgacctatccacagtgccccctggtgaccctggctcctataaatcgcccttcttgaaggacttcatccacctgaatgtggccatgatgacctctaacaatgctctggttcccgatcctgacaagcaagatgacttggcttccaagttttggcagtggccgattctcaatgtcggcttgcgcatgtgttcttgggatgatagcgttgtcaaatactatctgctaggaaaccccctagtctattggggaagcactgccgctcttggtggatttggtcttcttttcatttggtaccttctgcgctggcagagggggtacaatgatctcagcaacgaggaaattagtcacatccactactctggcatatacccagttatcggatgggtcttgcactatcttccctttatcatcatggcccgcgtcacttatgtccatcattactatccggctctctactatgccatcctgaacttcggcttctgcgttgattgggtaacacgcaagatgaaccccagattgtctgcagcggtgtatgctttcctctacgtggttattgtcggattgttcattcatttccgagccatcgtgtttggaatggagggttctaaccagcaatggagtcatctccgctggctacccggatggaaaatggcgaatgtgaactaatcatggatcgtttgatgacttgttctcgtcctctctgcttgttagcttgtgttgactaccccaaagtggaccttatatgcctacaggtaattgtatcaacccggacaattcaactttacttctgtatttgtaaagaaaaatgcaatgttatcagagatactagagtcttcatttcgatcgttatagccacgcttagtgtctggtaacaacttagttcaatagtgatgaagatgtgtccgggccagatgttgctgactatttattattacgggctgtggatttagcaacatcccccggtccaactgttgccacctttgcgcatagcatcatccattcccaatgtgacggttctagggatgcccgtgtttgctcctcccgaggctccgaaccctttcacaccgcttcgccgatcattgaggtcgtattttcccgtttcaatgttacgatagatcctctcagcaacttccaggaacgctcgttcaacgccatccccagatttggcgctcgtttcaacatagcgaaccacattgttcaagcggcaccattcttcggcctcctcctgggtgacctgcctttgatttgatccagaactggcccccgtcagatcagtcttattaccgaccaaaataacaacgatgccatcttctgcaatatgccgtagatcctgcagccactgagtgcaagatataaaggtcgagtgtctggatatatcaaagactaggagagcgccagaggcaccccggaagtaagagcgggtgatagacttgtatgtctcttgtccagcagtatcccacagtgatagtttcatgcgcttttgattgggggaaccttgtggttttcgtggaggggtaggaagaccagaggtggtagacgcttctggaaatgtatcacccgacgatccggtagagggctcatcaagttctagctccagtgaagctggaggaccaactggcacaattcgcgacccgaactcgacaccaatggtcacatcatgagatggggaaaaacggccttcacaaagtcggacggtgagctattgttcagttagcgtaggtccaaggtccaaggctgatagcacttacgctggacttgccagtgccagagtcaccaatgcagacaagcttagcaatataatcccatggctgtgacatggagagagtagaaaaaaatccagaatcagaaatggggaaagaaagcgaaggtcagtttacctacgacgtatgtcgatttggagacctcatggttatcagctgagtcatctatcaagcctgacgtgcccgaatgacgctttcatcagctgcgtgaccctagcccttcaccttatcccaggcaccacacacatcctctctcctagatttggcatatctcaaacaaattcaaagtctttcctcttaccctctcttccctttactctctaatatccgaccgtacttgatttcctcgacatatttcctttagtgatctatcactggtcctgtcccactcaccgtactttcttcgttacgataacaggccatgttctctgaatgtaagaactggaagatcctgagtattagaagactatatggctaacacttcgctttagatgcctcccgattccttgctcagtcacagtcacgagtaacctctcgaccagatgaggttcaaagaacgggccgtagccgccctggtcaacatcaaggcaaccctcgacacccctcatcgcgctccttcttacgacctaccgatccttatcgaccgggtgcatcccagacagctcaatttccttttgcccctcgcagctcggttcaacaagctcccctcttcttcagtgccactgatgagttccgagaggaagatgacgaaacagaacgtgagcgagaaatagctgatttctatgcactccaacgatcaaggcggcattttggcgacagcaacttgaaagaatcttcagaacttgaggattctgaacgttcaggtcttgaggaaagctcaccatataacgatcgccctggcaaaggcatcaagagctcatggcggggagaagaaggtgtttttggtgcccgtccttttcctatcgagtctgtggcagaagctccagagcacgaacaggcacctcggtccagcccaagcagtagcaaagttcgaggccatctagttgatatcggtctggaggattctttacgggccgattttgacgatgatcagacgttatccagtcccggtgctcacgacccacctgttcagcgattccgagaacgagaattactgaaggagcactctggtaccagccagcatggatttactggcgaacaggctgagattttatcgcaagacgttccacggccgcccagctcggcaagttcatttccaacaacggtttcaccgctagcctcagaaaacacagtgcacgacgccttttggggccatttatttttgatatctctcgcgggattatttgcttctgcatttctcgtatatcttcacacatctaccccgtctggagacaaatcaagatggggggatacaatctacatgactgtccatcgatcgttcttcctcctcgggatatatactattgtatcggttcttgtgtcccttctttggttggcgttactacgatcctatgtgcgacttctagtccatgtgattctagtcgccgttcccactatattatactctttctccttgtatcctttcatctcaagtttcaagggaccgtggcatggcaccagtatccaagacaaggcgatgaggtggggctctgctgtcccgtttctcatagctaccatgtggatctacaatgttgtgcgtggccgtcagtctatagggaaggccataggcattcttgaatttgcctgtcgaatcttggccgccaatcccgagctgcttgctcttggtctgggtgccctaatctgcgttgtctcctggacgtggatctggatgctgatgttcactcgtgtcttcttgggcggccaccttgttagctcaagatcgttcatcattgacgtgggtagctggtggctcgctatctatttcgttgtagtttatctatggtcggtcggcgtcatcgcaggcatccagcgtgctgtcaccgctgcaacagtgagccagtggtatttccaccgtttggccacacccgcgcccacctcgaggcagattgttcaggcagccatcgttcatgccgccacaactctctttggcacgatctctttgtccagactactcgggctactggttcgacttcctcttctattgctaccagatcgcatctgctcgttgcttagcctcttcgcctattcactcgttcccaccccaattacttacttgaccaatcctctttctctcacctatgcagcgattcattcgcaacctcttgccgcctcctcccggggtttgagccaaatgactgtccttgccccatcggcggcctccacgtctttaaacccccgttcatattctcggtctcccaggagctctgggtctttactctcatacaggctgtctaaattgatcctctacgctgcccgcttcataatgtccttggctttagggttcggcggttgggtgactactgctcgaagcctgacaatgtcggcatccggtggtaccattcgtggcagtctttatgcctacgtcgtcggccttattgctggaacaattggttggaccacactgggcgcaatggaaggtgtgatcgcagatattgtagacgcagcggttatttgctgggcaagcgaggtcggtatttacggcagagaagcccggtattgccgcgaggctggttggctctttggtgactcgcagcctcacctagggcatgaatatcaagaggtctaggtcgttttttttttgtcgttctttcttcatcttataagtccctaacgcattctctctcatggttatgacatttgcaacaatcctttgtaccattgagcgttttaaaacattcctatatactttagcgaaattcctaactctcaagtagaagacttgacaggcaaatacattctacatttatatctcggttgtacgcgattccaaagcagctagctctctgggaaaataatttattcttttgcatgtcccatggtatattcgaattgcaaatagctgcatgaaaatccagggctcgtggtatcatgagaaaatataaagagaaaggaaatgacttgtgcgggaaaaaagacaaggcctcccctgagacgccatatgaagcatattccgagcgacgaggagaacaaaggagaaattatgaaacatgaatcagagaccaagacgtccattccactctactcgttctttcgagcaccattctttcagcagggaccagccaaaccgaacaacttcgatgggcggggtagtgccaccaaatggtaggaaatagcctccagcataatctccagccctgagggatgatcggcctctttccgaataatttcgagatcgctgcgaccagatcgtggggaactcacgcccaaggacatcttcagaaagaccccgggtgccctctacccatagtctctgggaatccctgtaggactcaggaagacgagccttcagttctgaaaattccttcctgcttttcctgttctcgtccgacagggctgcgtttccatcactcccaggcgtaggaaacggggtgtgctccccaggaattgggcttacagcgaggcgttcaagatcgagagtgtgaatggcagtccaggacacagccccaaggagcaaacagagactgtttaatgccggatatggtacactgttctttctgaccacacgccagtatggcacaatagacagccatgtcgaggaatcgccgacctggcgtgacgaagctttggcctggtcgttcgctacaaatgccataataaaggacaacaacgcttcgattgcagtcacaacggctagcttttcgtcagtgaccgaggttccggttttggaggtatgccgctctgcggcatgtttcaattcacgcccgatgctagcaaacctttgccactcatcccaccataactgccgctcattgcgcgtacgaccatctccctgtgtcggagaaactttcagggttgacccgggatcaacggattgacgtttgttggcgggattgggaggattcttgccatcggtcccatcggtctgtccgagatcatttcgacgagaggcaggaggttttacgtctttcagcggcgtgatggaagctggtttggttttgtcatgggtgattgaatgagaggtcaggtgttgctgaggaaccggcgttcgaggcttttcaggtaaggtttttggctcccttgaatgaccagcttcaggaccaagagcttcctcagtctcatgcttcttgcccttcggatccgcgaatgtgtgcccacgagacgaaccagtatctcctcccctcttcctgggatgagagatatcatcacgatctgtatcctggctaaccggtgaatcggacagatgggctttccttttaccagagaatttaagcagagcttcgacacgctttcggtttgctcttccgtaccgcagtttggtaagaagctgcatcttttgtgggtcggcacgagtgtggtctcttgtatgttcgtggatattggattctttggcaggcaatccttttcctgcccgactattgcgagacggtgaacggtcctcaaggcgagccaactccctttcgatgtctggggggagagtaggagacagcaagcgcggaagtctagggccacccgatgtcggtgggagagtaggcgaaagaagtgtggggagcttgggggagtgtaatttggcagggcagggctctcggtgtgtctctttctcgggagagagccgcagtttctttatatgatgtgcctcggacttcttagttgctgaggggttatggtattcaggttccggcccagacggccgtttctggcccgctctttcgggagagagacgcgtatgtgactttggcggcattcgaggcaatttagtcttatcgttattcttgaggggttctgaagatatcatctgtcgtctttcttcggacttggcggagcttgatacgcctcggctacccgcttcgaggccaacgggggatgcgacagggccactggtcttctgagtcttgtagtcctttaggctaatcttctttttggccactgtttcccttgaactttctccaacgcttggggctgttgatcgatcggccatcatgcgccctgtttcgtctgaccagtccccgaccgctagaagcaatgagtctgtgtcgtggtgtgtcaagaaggtcatatattgtagttgctgctcctccaagctgaagggtctgtcatgccctacagcccaattgttggcgggccggttccccgggttaaagggcgttttggtcggaaatgtgagtaaatatggaacgggggggagaacgtcgtccgagaggtgctgtaatcgttggtcaagaacttcacggtccgacgtggaggaactcgcagctcggaggtttgtagtggtttgggaatggcgtttctcgttcaccgacatcgcagtgcgcagggtttcgcgaattgttcttccacaagagatgctaggatgatacgcgcttcaagcacaatttgggccgaagtctatcaccgagtcctgttgctcgagtcggtatggcgagttgcctggtgatagtcaacgcattgagttaagtgaaggatagtggatgtacaagatccggccttgttcaggtgccgaataatcagggcatcctatcactatcgcgcgtggggggggtgttcccataaccctgggatttcgaagccacgcaattgggagggagaactaaacacagggtaacaaagaaaaagtgggatgtgtcacaatgagagggtgacctctttccattaaggagcgagagatgggaaatgtccccggatagaatgaaagagaccgatgaattggagaaggttacgttaggtcggttacggtgttgcttatcggcttatcgttaccgtataatttcattacatacagccctggaggtacttgcacatctattgatgaggatatataaagtctcgaacacttatgtacatgcacatgcacatgcacatatgtatatgtaggatgtatgtgccttgtcggcctggtaggatgtagggaatgaatatgtagaagttactccatgccagggttgtgttgttgaagcctcaccgttcaggaacggtcatcatcggcaaacttctcacgccagaatgcacggtaatgtttctgctcgccaaccttggagatctcatcaacctcttgaggagtcagtttgaatgtaaacgtgcgcaaatagccgttcaggcgggattctttgccactagtggtaatagccacacagccacggtcaattatccagcgcaacaagatctcggactggctgactgcatacttggtggccaaggaagagagcagagggtccaatggaccaccctgggcccgggtggcaggggtgagacccccataactaacagtcttgatacccttactctcttggtagggaacaagattgccacgttgaaggtaaggatggaactcaatctgattcacagatggtaccactttagcggtctcgagaatggtctccaagtcgctttgtaagaaattggacacgccaatggaccgggctttcccagatgcctttacttgctccattgcggcccaggcagcttgaagtacatccttggactttgcgaagtacggagcatggatcaagtacctgctccattgattagaagcagtccccgggcgagccattactcacatcacgttggagttgacttacagatccacatagtcaagttggagcttcttgagactggtatcaatagcctgaggaatatcggcaatattggtgatgaccttagtcgtcacggtgagtttatctcgagataccccgctttctttaattgcctgccccagttcctcctcggtttggtagacctcagctccatcgaggtggtagtatcctagcttcgttgccatcttgatcgattcgaccaattcatgattgataccgatgtcagcggacttcttaaaccacgcggtaccagtgccatatccaagctgtatttgttagagaatattgcccatagtatctatgaatgtggggtaatgatagataactcacgatagggaccgaggtaccgtcattgagatccaatgtaggaatagatgaaataatgtttgccatgattccaaggtgttccaaaagagtaatataggatgatgaaaggtgttgtaagggatacttgggccgtggtacctgggggaggaggggcttgtccacgctagacccgtggactgggcaatgattaataatgtcaattatgtcatttctaacctcccgggagctgcctccagagctctccatacttccagtggccactaccttcacttggatccatatccccgaattacttggtctctccctctctctatgaacttccgtctgctcgccgcatgttcaagaaattggtatatgtttccacgcagctttcggccaccgtcggttcggaaccgtttaaaccaaatggtatcacatctttcgactgccgggatctcccttgctgagttaccgaaatcaaatattttcacatctaaattaccccatgatccggctttcgatacaccggaattgtctcataaggccccaagggaaactttggggcctcgcatggtcaatggagctttgttcacatatattcgcccagagcagactgccgagccagaactactaggagtcagttcgaaagcgatgaatgacttgggattgaagccaggcgaggaacaaacgtctcaattcaaggcactagtctccgggaatgagatttggtggaacgaggaacagggtggaatctacccatgggcacagtgttatggaggtcagtacccacgttgtcatgcccgagaaacccagatgaaactaacctgctcaggctggcaattgtaagctacggaggaagctagatgtgacttacagctgacaacatgcagcggttcatgggctggacagctcggagacggggtaagctaatggattaacatgagttctcagttcactagaaatactaatgattgacaaaatagcgtgcaatcagtctcttcgaatgcaccaaccctcagacaaatacccggtatgagctgcaactgaaaggagcaggcaaaacaccctattcacgttttgcagacggcaaagctgtcctccggtcaagtatccgtgaatatgtggtttcagaaggtaagtaaagctgtatgaaacccaaggatagaccactgaaacattgctagctctatctgccctcggtataccaaccactcgggcactctcactcaccttgattcccaatgccaaggtattgcgagagcgtcttgaaccaggagcaattgttgctcgttttgctgaaacttggctaagaatcggcacctttgatctacttcgtgttcgcggagatcgtgagttgatcaggaagcttgcgacatatgttgcagaagacgtttttagcggatgggaatcccttcccgccattgtatcgctgggtgaccagcagtcttccacgcaaatcgataatcctcgtaggggtatccccggcgatcaagtacaagaacaccaggatgtacaagaaaatcgatttgctagactgtatcgagaaatcgctcgccgcaatgctaagacagtggctgcatggcaggcctacggcttcatgaatggcgtgctaaacaccgacaacacatccatttatggcttgtcactggactacggcccatttgcgtttatggacaactttgatccccactacacaccgaaccacgatgaccatatgctgcgatacgcatatcgcaaccaacccagcattatctggtggaatctggtccgacttggagagtcattaggtgagttgattggggccggaaatcaggttgacgaggaaagcttcgtcaataacggggtgacgaaggaatttgaaccggaactcatcaagcgtgcggagaaagttatcgagcgtgtgggtgaggagttcaaagcagtattcctaaacgaatacaagcgcttgatgggccaaaggctaggactcaaaacacaggccgagtcagacttccagatacttttttcggatatgctagacacactcgaagcacttgaactggacttcaaccacttcttccgccggctctcagggctgcctctatccaatctggagaccgaagaaggccgaagggaagcagcctcggtcttcttccatgctgaaggtttcggtggaattggatacactgaggctacagctagagatcgcattgcgaaatggctggatatttggcggcttcgcgtcctagaggactggggccccgcaaacgacgaggaaagacaaaaggccatgaaatcagtcaacccgaacgtaagtatctgctgaaatcttccttttgaagtccggtgcccatcgactaacctattgatagtttgtgcctcgagggtggattcttgacgaggtcatcgagcgtgtggagcgcaaaggagaccgagatattctaggccgggtcatgcatatgtctttgaatccattcaacgatgaatggggtcttcacaacgaagaggaagagcgtttctgcggggatgtccccaagtacaaaagggctatgatgtgcagttgcagctcgtaatcaagctacgagcgctataccgatctcagttctctgggaggcgagtgtatgatatatgacttttttaaggaaccagaaccgattggagctagatagcaaatgcatcggctcccacgagatagcctcggagaattaaacgtgcaaatatgagtatttgccagactccctacttcacattttatacgcgttatcataaaacccgcgaattaccaaacaacctaggtgggagtcatcaaagttagatcgtgtcaaccttgtcaggcgttgatctctaatcatacattttcaggaaaaaaagagaaattcgtttcgtgcatgcatgaaaaatgtcgtccaatcccatggaaactgtagaaagatgttgaccaaaagagcaatgcaagcaatgggcaccctagttagggcaagcggactgaacgtggccgggctgcttgcacttgtagcacatgcgctcacccttggcctcagtggggcagtcgcgagagacatggccgacttcgccgcctacttacaagttagtagcatattccggcgaatgagaaaacccggaataactgacagttgtagcacttctgaccctgagtgcagtcacgggccatgtggccgaagccaccgcaggagtagcaggtctgttggcgaccaccggcaccacctggaccactgaacccaccaccgtagccgcctccagcgctgtaaccaccactgtagttaccaccctgggagcagttccgcgcgatgtggccgacctgtccgcacttgtagcactcctgggaaccaccaccgctgtagttgctgtcgcctccctgagggcattcgcgagaaagatgtccggtttggccacaacggtagcacgacttctccttggcaggttcctggcattcgcggcctttttaaaaaaatgttagtcaagtccaaatagagtccgcgatattcaattccaacttactcaagtgaccttggcctgaaattgtgattgaattgattagcaacgttctaataaccagtccatagatccaatggacgattttgaagtgagcgtaccgttgcaattgtagctattggaggactgggttagctttttgaattgacagatcaaagggaaagagaaattaccaggtagggtttcccttcttagggcagtccttggcctagaaagagcagataagcttcgagtctccttttttaaatcaagttttcaagaggaaatcgggcaaaggttgtaattacctggtgggaggcctcgccgcctataaaagaagagagttagtaaatatcagcttgcgcaatagatgtcgcaatagagccccggatccaattcgagtaccacaagctctccgaatgaatatgacgtattcacaggatttgaccaagccggtgcttatttctcccagtccaggttgcagtagaagggaaaaaagaacttacagttgaaacagccaccacgtcctgcaggagggaagtccatatttgaataaggggattgggaattttataagagggaaagtaataagtcgttaggaatgaagaagttgaagaatctgaaaaatataatattgtagtgcggggagaaatcttcccgcaaagctgaccgccctgaagagagaaagagatggacttctttttgattcaggatattcttgctcgtctgcttctttctcacttggatattctgttttctgggtattctgttcttctctggattccccccagtcctcacccgagttttctagaatggaagtcatcacggattcagagaatgcctgccctatccctttttttatccatttggaaaggtgtaatgtaatggatgagaccggagaatggaaaataacaaaagtcgaacaaagattcagggtccaacttttatatataggagaacaacccctgtcttgccagggtccccagtccaggtgggctgagtaccttgtgctaccgaacgcccgctaaacaacacgtcacagccaagttagggaatgattccgtcttcattatctgttggcatacctcgacaatatatatatatatatatatatatatatatcttgtgttaggtgaagtcgtaacactcaagtagctgtgttccggtcctttctcgaaggagaagtacccgttcatcatcaaatccgataggcacagtcacttcttgagtttccagatccacactgcccaaactgtggtaaatcggtcctaatcctggttctggttctggctcgggttccccgtccttgttcccagcgttgagctgaacaccgttctcctcgaagaatttgcggctgcccagggatgatatcgccatctctaactcccatatccgaatctcatcccctcgagagcttacagagacggctttcccgcggttggtcacctgaacagcagatacagaagaggtgtggccccaaagtcgccggcctccttggacaaacaaagattccaatgtagatacaacaaggtacatagtcaacgtgttatcggcatgagaggtcagcaaatatggatgggaataggacatagaggttggcggctgttgatgtatgatagacggtgtcccagggtcaatgggaggttgattgtcgaccgactcggttgcagagtgccgcctttttctggattgaagtggcctcaatccatattgggaatccactgtagtggccagtcgggaatcgagttgttgcccatctttgcctagacgcagttcttgtatcccctgagaccacccacagccaatgtggaagaaactatacacaatagtagcgacaatttcaaacgacgaaactctaagagatagtgtcatgggtgcaatcatgttatctgccttgagggaggcaacccggaggggctctgaggactcggcggttgcccccggttgatggctgccaggttgcagattgtacaaggtcaaatctttgtgctgagacactaccattaaatacggcgacgatagagcaattgctgttatagcagcatcactgcggccgacatgagaagactgcaagtctagctgggatgtttgaagatacaagacgaagaggctgaaatgaccattttccagaccaactgagatctcgatcttatcttggatctgacttactgccaaggcggttggagtcataggtgatgatctcgatggagttgacaaaggaactcttgcgagacaacatgctgaatctcttgtggtccaagcccggagcccgtgcgctgagtctgccgtaaagacaatcccagcacaaaacttgactagcgtaggagggcatggcggccgaggaaactctacctcggtaacccgacatagccctttggaccagttatgtctgagccgatactgccgtttccaattgccttcctgtgccaagtgcccgtggtcgaaccacgttgcgaccttgggcgaataatctgtcttggatggaagggttgtgcgtctagtatttgcaaggcggcgggcacggggccgcacccattgcgagtagtattgccttttccatatctcagagtctccaccaagaacatggaagcgatgtgataacctgaggtagcaagttagcgagacctaccgagaaggaccgacgaaaatgagagtatatatatacctttgacacacgttaagggatgatactggtagaaaagacagaatatggagcagcaactcattgctcagacgagacagacgatcaacaggcctgatgtcgttccgagtacggatccgcttttgcggtagatcggagtcccagtggtctctgcatcgtttagacatcctttctcgggctaaggaaaagaagaaaaagctttgaggagactagtagaacgaatcggagaaatcattccgcacgttcagagaaacaatagtggttaaaggtggagggacaattgtacgtggagttggccccgagccaccgaggatcttatcagcaagtgataagctcacgtgtgctcatttagcctcgacgcgtcgtcgcgtttatatctctacctgacatgacgtctacagcttgttttcttttccttttcattccgatccgtgtggttaccctcggtgctataatataaacctcacaatggaagttgtcaaggagctccacgctgctgtggcaaatgcatgtgaggaatccttcgacaatgcctataagcacatgaaatcccatattgatgcatacgtcaaagaggcaaaattaaaagaatcaatggccagccaatcacagcgacgatcagagaccagaattcgagagcttgaacatgatattacggtactccggagtgagctgcaacaatatgaagttgatccacgggatcttgaacttcccggggaatatgccaatctagagaccgaatttgacccgaaaaacctgtggggggataacctggaggaggaggatcatcgcagttttcggaagtctcggaacagagttgaggccaaatacaccgcgctttatacaaatttacagacattcatccaaacttggagtggtctcaaatctcgagttttgcagcataaaaagaagctacggcggtgggatcagcaattagagcgtggagaattctcgcttgttctcaatggtcaacccgtcaaattccgcagggtggaaagtcccaccttcgaggatgtcgacaaacactcggagacccaaggctcctcgaagaaacgcccaagagaagagtttccagatcttcctgccaaggccatcaagttgtcacaaagaaggtcccgcgcagatgatgaacatgcagatataagagttgaagatgataaccaaagagtaattcacggcttaacatcagagtcagcctccactcagtctagttctcctagacccgatatggaaccctcagaatcttctgatacaatatgtttcctacctcatgcctgcggggagcagactcggcagaggctttccccgacacttcccgacaggtgtcttgtgcacacccagcggacggtgatgagcttggagcgccctgcagttgtcaaaaaagagatcttgtcctcgagtccatctcgaggttcaatacacaacagtgaacagccagttgtaagcacgcaagatctggatgagataggggacacgatacggacaccaatcaaacggaaagcctaccgggatgtcaatgtcgcacatcactcgaaacgaattccgataggcccgcaagtatctcaacagccatctataccccaaccaggtgacagcaacatacgcaaggctacattctctgtacagggatcctccacgaaacgcctccaagatctagagcgacgcgcaataccagctctggcagaagacggcgaggacgcgacctccttaccgacgtcttcgaaaattggctccggtgtcaatatcagaccttcggaagccaagacaaatagtggatttgcacaaagacgcctggaagaccttttggaacaatcggtgccccccagatcaccacttcatttgtcgagcaaagtctccggccttgattcaccaaagccaaacgatgcaacccgcagtgatcaactaacacccaagacgttgagtcaaacggcgccaaatataaaccccgatgatgaaccatttcgggcaagacctcttcgttgtcttgggttggaacatttcaaaatcaatccggctagaaatcaagggcttgattacgcatatgatgcagttatccgaaagaagcatgaccgcaaatgcatatcaggctgcactcgcccaggatgttgtggggaccggttccgggctatggcccgccttgggggtttccccggtaaatctggagcagaacaggagaaagaagatcaggcaattctacaggaattcctgggagaagatacacaattgcttcgaaacatgagcggtgaagagcgtgaaaatctcctggtggaagcgagagccagggccctggccaaccaatatggacgacatcggcatacccatcagcgggctcaatcccctcctggcttctggcggactgagatgccagatacacaggaggaggaagacgaccttgaagctgccaagaggttggagcgtgagaaagtggaagagcgatatcgagaggctatgcgccctggggggttatggacatgggcggatgaatgatgaataagaaaaacatatttctatagcctattcaatattgatttatgactagaaacacatcatgaaaggtatccgaaaccatctgttcataggtaaatgtaagtatgaaagcgtcaacctcggcccaaggcatcttggcagacgcaagacgcgggaccacgtgccttgcaacctcccgaggtcaccctccccatctcctccgtcgctatctcaacatgcttgaagcttagagatggaaaccgttcgcaatatccagaatccaataccgccggtgctcttgcaaccatctaaatggctttctatctatgaggacttcgtgaccaagaatgccagctcggttggtcaagtcgagtcagcgctgagatctttgacttatatcatcccaggtgagttctcattcggtttgaccatgcaactgttcaataatctaacagttatcttctatcagggcgataccgcgaatcagatataccctcagaatgtggtcagtgtaacattgtacttgcctttgggcacgcctgctgatttcccctgcagtacactccggtgtccagttgttatcgttataccatgactctcttgtttcgcgagttgttgataggcttccgtccactgtcccccgaccgccgcccactccccactcccggtataccaaatactggacctctcgctcctcgctatatcgccaggtagcgcttgcgctacaaatgcttcagtataccgagcttctctgggagatggcagcgcggcggcgtggccagaaaacccgttggcgcgtggtcatctttattgaatttgcgaaggcagtctgccgattgcttcttctgcgattgacgaactccagacctctcgtcagtcctccacttccagagcgcgagatagatccaagaaccacagaagaggaggaaccacagagtggttggaatggaatggacactccggtcagcgagcggtcttcagacttgagttggaccatgcctcgcacgggactttcccttccgtccctgcccgacgtaaacgatgtgtcgaactatctcatctccaaagtgcttacggcagatgacattaaacccccgaaggcactcctccaccgggcgacaggacaagggcaactggctgaagtgctatacatccttcggcctgtcgtctatgcattggcgatgcaaaagtggagtggtgataagcgaaactggcggccatggcttattggattcggaatggagtatggctgccgccaactcgcaaagcgggacttccgtgaacgggtcgctggcggtcttcgggggtctacagggcttgagcgagaggaactgaagaagcgtggatggtcaatgggctggtggatgatgcgaggcgcattttatgagaacgtcaccaagtaagaaccctgcctctggtctgtctctggttttctgtttaaatactgacattgtgaaacaggtcctggctacacagtttaactggaaagatgaaaggcaagccattgttagacttggtaagcagtgttgtggaggactatgaatacctttgggacaacttctacttctcgactgctacgctgtgaatttccacagatgagctcagattttactcacccatgatacccattatttctatgtacaagtcactttttatgctattccatttttcatttgttctcactcttgctgtgcttcgcgcaaggggtatcattagtgttttattaagtttcatgtctaatcacatttcacggagcgttcacattcagagaacctcagtttgtctgtgcccataccaatctcgtaatccaaccttgcccatgcttttcccgggggctgatgatagtaagaactcatctaaccgagatgccccttcctcctcttcgtcgggccagtcgactcttgctcctcctttcatttcaagcatctcctttgcagtgccccagctaaatcgacactcattgccccatccaaacacagggtccatgttgcgccgaagccatccgacacacttggagtccgagggataaccacttccccaagtctcggaggttggtgtcagtggctgctcagcccggagcacggcctcgtacatgacttccagtgcaacgtcccgcgtcaccttggctgccacactggcggcgctgacacatgggtacaaggaatcggctttctttgccactgtgattttgagggatgggaagattcgctccaatttttgctggtatgtagcggggttcccaatcgtgtcaatgtatacttctcgcacatccactccacggtcttcaaccacccctcgaatgatctccaccgtggcatccatggcctgggcattcagattgtacactgcggtaggtgatctcatcatgccagaagagatatcgcgcgccgaaagtactttgaccgcatatccgcaggactcgaacaatgaatctcccggtgtattcaatagatgcatcaagttcgctcgcacggcgggtgtaaggactttgctgtcgtcaaagctgtgtttctcggtcaaaagcgagtggtgcagatcaagagggagatagaaggcaccgtaaaccattggccctaggactggaccacggccggcttcatcgacacccaagacacatggtgtactctccagtgtatcacgaattgtggatgaggtcccttgaggcgtgattgcgttggggcatggggtgtagtacgcgtaggactcgccggagagaagtggttctgaaatcacactcggaggaataaaggtggacgattcctttagtagattgacggggggagtatcattaggcataataggcatataggacattgaaagaaagaacaaaagaaagtcttgaaggtacaaagaaatgcaaaagatctcccgagtgcacaactgcacaacgcgtcgactgttcgggattagcgggggcgcgtgttgctcttcccgcctaaattccgcattcctcccctccaccttgtctctcttttgactgattttcttgattctctctctatcttttgatttcaattccatcctagtgctcaacttccaatatggcacgagggcccggaaaggcccgcgacttcgactactccaatgtgggaactaagggaaggtgagtcgatatgttttagtcaattccacttgtactaggaccgctaaactgatccaatacgtctaggcgcactggcatatcgctgaaggaaggtcgacgcgatgaacatggaatggaagaagttgacggcctcttctcgtctcctgaaaagtcgcctgtgcagctcaatgggtttgaagaggaggaaaataactcttcggctgggtccgagggcatgtcgatggacgaaggtgggctgattcagtgtcgccttatattgccgactcattgcgtgctgatgcacattctataggcaatgcgccagatcccatggactttctcaagggcacaaatggctcacgtacctctttcccccccccgcctgctgcgcggtcgccgatgaagactggcctcactgggtctccgcggaggacaccagcgttgcaatcaactccagacccgcaggatattcttgagtcgtctagtccgtctgacggcaaaggtttcgcgggcgcaccggaagaattacgccaagatccatctcctctttccactcgctcggtgaacgtaggacgctcaaaccagaggaatggcacacggcgaaaacccacgacaaaagcacagctagcgtcagaatccgagcccgcagtcatacatgacttttcagacttttccgacgccgacggcgacggcgacgagaacgcgagtgcattcgccacggtacaacaagattttggtggcagtctggatgtagaatctgattcagttgctgcagagaaggtacccgattctcccgggcaagaccaacacgaacatgacggcaattcatccacaactgacacgactccgcctcgggaagaacccgttctggcctccaagtcaacaaagaaggtggcgccaaatagtaccaaggcaggcaagaaccaggcaaaaccccctgcgccgcgcggacgtccaaagtctgaacgtcgtaacgtcgaagaagatgccgaccccaggccaaccaaaaagcgaaataccaccaaagcatctccaccggtgcgtgaacctttggaaccggaattggatcgggtggttgaggattacgccaaccgcacaggacctttgaagggccgaagtttgtatatcctcaaacgtgaaatccccaccgacaatagtgcaactcacactcgatctgggcgggtttcggtccgaccactagcatactggcgcaacgaacggtgcgtcttcggtgacggggaggcagccgagggacatcgataccctctttcaaccatcaaagaggtcattcgcaccgaggagcaagagcccgaaaagaagaagaaggggaaacgctcaacgtcccacaagtctaagtctaagaaacgaaaggatgactcttcggacgaagatgaggatgttgatctctgggagaaggaaggtggtgttcttcatggctacacactcaaatgggacgggaaaacacagacgagttcaaaggaggaggaagtactaggtatgaaccccagccccttcatatttggttcctttactaagtcgatcttgatacagacattgcgtatgctccctctggaatcgaaaccagagaagtcaaagactcaaccttccgatttgcgaagctgcttagctcgtctttcatcgggtctggcgttgtggagctcccacctgacggagtcaagaaacccaagaactccaagaaaatgcatatggtcttttatgtctgtcacgggcgtgttcaagtggatatctcaggtgtccagttcagtgccggaaagggttgtgttttccaagttccccgtggtgagtctcatgttcatggcttcttgattcgtatcaattctgacgccatgatcccatctccaggtaattattatagctttgcaaacacccaccaaaaggaggctcgacttttcttcacgcaaggctgtgtccccgatgagaatgagaacgagaacgaagacgaaacaccgcaaatgtcccaggatgtcggccctgagagcgaatttgaagccgacactcccaccgctcctgttcatgtccctgcgaagaaagccaagggtcgccccaagggcaagcagaagaagattggcaaatgatctctccatttactctgcccccacttctgttttcatgtttgtaggcatcgacaacgcgccatgatacctttcttctacgtcaatgcccccaagtctcattttatgggcatctaaatgccttttattgttattcgttcttcagcgatttgttttcatacgattaccagggaatttggcgtttttttgcctgtttctccagttaattatgcaatatctattggtgataattggtgatggaagagcaaccgagggaagctgggaatcagaacctcatgtattcgaaactatcgaaatgtattcgttcaaagtacacatactcagtgtattaaatctcctccattaggtcatctaggtcgtcatctagacccagcggggggaattctccaacctcgaccttctcgggcttcacgaagacgcccctgttgcctaagcactcgaagtagcgctgtccgcccacactaccgtcattcttccccatcggctcgtcaagctcaatcccgacccagatcggctggagatctgccggaagctttgcatcctgttgcagctcgcgacccgggccggtaataggaatagtcggaacaggtccaatgaagcggatcgtgccacgtcgaatatgcggcggagatgaaggcagaacgatagctcgtctagcaacagtgattcctgccaatatattattagattaatgaaagaaaaataaaaataaattgcattgacacttgaaattttttgtttcaacgaacctctcgtttgaatctcggtccggtctttctcaacttgatgtcgcaaagcctcttcgggcgatagagcgttagggtcaaaccgacccagcttctggttcttcttccaagccaacacagagtccgaacgggcctcgtatgtctcagttggcagcacatatttctcgactgatgataagtcggtaaagttagcccgcatggtttgcgggcggttgtcattgacctagtgaggggataaattagaatatgcccagaattcgtagcatatccattgccctgacaactcggatcaaacgacatgccgttttgggcccggtaaagcagccagaacagggtcaaatgaacagcaagacatagaaagaaaagagaacccacctcgatctccgaccccttgaccaacccccaatccccaatcaggcggtcgtccccatcggcccattggtcaggtcgaccgggaactttcacccgcaggcgctggcatcctggtgggattcccgtcatagtctctaactttgtcttaacctgcatcaccgtccaagttggggtgatgcggcgttcagtcaggaatcgaggctccgaatttccaggtttggctaaagccgcgttggtgatgatgacggagatatccatcggggtaggctggaatgccatattttctttgtatgacttgacttgtctgttcgtgtttctaggaagaaatgttagactgggctgtggattaatgcaaattctttgatggtagggtgaggcattcaaagaaaacaataatcgaaatcagacagctagattcaagatcctgtaatccttaagggtaaaaaaactaaacaaggaagactatgcatactattgcatgctgaatcgctgatatcaaattcccctgaggggcataagaagctaccggtacttgccagggcaactttgtggccgttggaaggaacacaacatattctagacgaaaaggacagtccttgaaccgggtaggtagtacttacagttgatcttgtgctcccctgtggttgacaggaaaaagaatatcgcccaatctcgaagaagcgattattagtaagcggtctccgccaggaacaggcaccgcttgacgctacacgcagttgagaatggaatcgacaaatgatatgtgagatgtaaagaggacaagatgaaactaagagccacctatttggtgcaggttatgtagataaacaattgcctaaacgggatgtcaaaacgatgtcaaagtaagtcaaccttctgtaagaaattgatataaaaacaagccacagctttgtagctgatgaagcttaactacttacgatatatatgaatactatttgtgtttaagtagtactggcattagaacactggggagccacaaattactacatagactaccgcgtgttaggaatacatatctagtcattcccatagaacaaatcaagtctaaccctatcatggaagccaggcatatcaaatataggctataatctaccatattgtgcaatatatcctatactatgccatagtagcttgcattctcatcagcgttcatacttcacgactgaccctttttatacaactctacaacaattggtcattttccaattaaaaaatagtcaagacagccaaacttgacatgattcaagcttgatactttatgctttttggaaccttataaaaaattcaacatcgcgaatatgatgtagatattatgcccgttacaaatcgcgagccacgtgatatccattctcgcttgacttttcaactctgcagcagctcccaccttattcacgacgagagcaacatggcgtcccaacaaacaggcgaagcgtatgagcagcaaaatgtccatgaggtgtaccaagagatcgctcagcatttctctgccacccgctacaaggtgtgtttcaagcgactggctatcaccaccttagaaagttccaactaatcacaattctagccatggcctatagtcgagcgatttctcacaagcctagaaccaggtgcagtgggtttagatgtagggtgtggtaatggcaaaaacttgatggtcaatcgagacgttttcatcattgcctcagataggtatgttctgatatgaattggattttctataggctacttcatttccctaggatatcatccaacttgtccattggatcccttgagcttgatctgggctaacccggtggcagatctgagaacttggctcggattgccctgcaacatcagccgcattcgaccgtggtggccgatatccttgaccttccacaccgggatgcaagctttgactttgcgatttcaatcgcggtggtgcaccatctttccactccggc
